(19) United States
(12) Patent Application Publication
(10) Pub. No.: US 2015/0359879 A1
(43) Pub. Date: Dec. 17, 2015

(54) RECOMBINANT PARTICLE BASED VACCINES AGAINST HUMAN CYTOMEGALOVIRUS INFECTION

(71) Applicant: Redvax GmbH, Schlieren (CH)

(72) Inventors: Sabine WELLNITZ, Urdorf (CH); Corinne JOHN, Horgen (CH); Christian SCHAUB, Wadenswil (CH)

(21) Appl. No.: 14/436,943

(22) PCT Filed: Oct. 30, 2013
(86) PCT No.: PCT/EP2013/072717

§ 371 Date: Apr. 20, 2015

(30) Foreign Application Priority Data
Oct. 30, 2012 (EP) 12190652.3

(51) Int. Cl. A61K 39/245; C07K 14/005; C12N 7/00

(52) U.S. Cl. CPC A61K 39/245; C12N 7/00; C07K 14/005; A61K 2039/5258

(57) ABSTRACT

The invention relates to gene and protein assemblies in the form of virus-like particles and protein complexes for use as prophylactic or therapeutic vaccines, and diagnostic and R&D tools for human cytomegalovirus (HCMV) and other herpes viruses. The virus-like particles comprise one or more capsid proteins from a herpes virus or a retrovirus, three or more CMV surface proteins and optionally tegument proteins. The assemblies are prepared using a technology combining recombinant DNA with disposable cell culture and purification techniques.

### FIELD OF THE INVENTION

[0001] The invention relates to virus-like particles comprising capsid proteins, cytomegalovirus surface proteins, and optionally tegument proteins, and vaccines against human cytomegalovirus infection.

### BACKGROUND ART

[0002] Human cytomegalovirus (HCMV) is found in all parts of the world and in all socioeconomic groups. It infects at least 60% of the adult population; in some countries a 100% endemic infection is already reached. Usually infection is asymptomatic in immunocompetent individuals; at times, a mononucleosis-like illness can occur. The infection invariably leads to the establishment of lifelong latency, which may occasionally be interrupted by reactivation. Immunodeficient individuals, such as therapeutically or iatrogenically immunosuppressed transplant/cancer patients, neonates, and HIV patients, present significant morbidity and mortality as a result of HCMV infection.

[0003] The current therapy of CMV infection is treatment with antiviral reagents such as ganciclovir (valganciclovir), foscarnet, acyclovir, cidofovir or leflunomide. Application of such antiviral agents has been approved for transplant recipients and immuno-compromised patients (e.g. HIV patients), but not in pregnant women. For these a hyper-immunoglobin therapy is preferred. Additionally, the existing antiviral therapies lead to viral resistance in a short timeframe or were not effective during therapy (McGregor A. et al., Expert Opin. Drug Metab. Toxicol. 2011; 7(10):1245-1265). Although prevention of cytomegalovirus infection, especially for congenital infection has been investigated for a long time, there is no licensed vaccine on the market. The development of a prophylactic HCMV vaccine has been identified as a high priority goal by the Institute of Medicine in the USA (www.cdc.gov/cmv/overview.html, October 2011). The potential benefit from vaccine-induced immunity has been estimated to be 40-fold with respect to intra-uterine transmission and 25- to 30-fold with respect to decrease in central nervous system damage in congenitally infected infants (Britt W. J. et al., Trends Microbiol. 1996; 4:34-38). There have been efforts made for over 30 years to develop vaccines. However, so far no imminent licensure appears likely, due to missing or incomplete clinical study data. Neither the live attenuated virus approaches nor the attempts with soluble proteins, especially with the truncated gpUL55 (gB) subunit vaccine in combination with or without an adjuvant like MF59, led to a long-lasting immune response (Zhang C. et al., J. Clin. Virol 2006; 35:338-41). New approaches to reach higher efficacy are under investigation and comprise glycoprotein combinations, DNA and peptide based candidates, dense bodies (WO 2008/138590) and viral vector based candidates such as the replication competent Alvac-gpUL555 (gB) vaccine based on a canarypox virus (Bernstein D. I. et al., J. Infect. Dis. 2002; 185:686-90). The first data of clinical trials with the Alvac vaccine (canarypox based particle) in combination with a live attenuated virus led to an appropriate immune response whereas the long-lasting effects are still under investigation. Virus-like particles can accommodate properties similar to attenuated viruses due to their shape and are therefore a promising option for vaccine development, especially since they are generally accepted as excellent vaccine vehicles. Virus-like particles have not been developed for CMV up to now. On the basis of the experience gained over the last 30 years for the development of an anti-HCMV vaccine, the following goals should be met: a long-lasting induction of neutralizing antibodies, induction of humoral and cellular, especially cytotoxic T-cell responses and minimizing side effects.

[0004] The reasons for failure or limited efficacy of vaccine candidates developed so far are multifaceted. The mechanisms of protective immunity in a host are poorly elucidated. One of the main reasons for this is the lack of an appropriate animal model to be able to verify the effectors accounting for protection. The ability of the virus to enter and replicate in diverse cell types including epithelial cells, endothelial cells, smooth muscle cells, fibroblasts, neurons and monocytes/macrophages resulting in different pathologies hinders the determination of potent effectors. Due to the complexity of the virus, and the lack of knowledge concerning proteins required for infection of specific cell types, the composition of an ideal HCMV vaccine is so far uncertain.

[0005] CMV is a beta-herpesvirus and belongs to the very complex viral order Herpesvirales. The CMV virion is ˜230 nm in diameter and is composed of a nucleocapsid, surrounded by a less structured tegument layer, and bounded by a trilaminate membrane envelope. The linear, double-stranded DNA molecule (236 kbp) is the largest among the human herpesviruses and over 50% larger than that of Herpes simplex virus 1 (HSV-1). In addition to virions, five other types of intracellular, enveloped and non-enveloped virus particles have been recovered from CMV-infected cells. The virus maturation process includes different capsid types of which dense bodies (DB) may play an important role in vaccine development. Dense bodies (DBs) are large (˜250-600 nm) and heterogeneous. They are solid spheroidal aggregates of different proteins containing a tegument protein (i.e. pUL83) and the surface proteins gpUL75 (gH) and gpUL55 (gB) (Becke S. et al., Vaccine 2010; 28:6191-6198). Uniform nomenclature rules for HCMV proteins were published in Spaete R. et al., 1994, J. Gen. Virol., 75, 3287-3308: an alphanumeric designation of each identified open reading frame (ORF) is the basis, extended by the prefixes “p” if the phosphorylation status of the protein is not known, “pp” for phosphoproteins and “gp” for glycoproteins. Small letter designations are used as suffixes to name additional ORFs that encode proteins. In the present invention the previously used designations are indicated in brackets, and are also indicated in tables and figures.

[0006] Among the HCMV structural glycoproteins, three major complexes (designated as gCI-gCIII) have been identified so far. These complexes play different roles in the virus structure and thus also for the design of vaccines, as targets for the development of therapeutic antibodies, or as research tools. The glycoprotein B (gpUL55, gCI) as a single soluble protein did not lead to a long lasting immune response against HCMV. Therefore, further protein compositions including gpUL55 should be taken into account for vaccine design. The role of gpUL100 (gM), gpUL73 (gN) and the formed complex gCII for generation of neutralizing antibodies and as an essential part of a vaccine is under investigation. Constituents of gCIII are gpUL75 (gH), gpUL115 (gL) and gpUL74 (gO) forming a heterotrimeric, disulfide-linked complex (Huber M. T. and Compton T., J. Virol. 1999; 73(5):3886-3892). These proteins play the most important role for viral entry and complex formation with further proteins such as gpUL128, gpUL130 and gpUL131A. The entry of HCMV into epithelial and endothelial cells involves endocytosis and complex formation of gpUL75, gpUL115 and gpUL74, or of the combination of gpUL75, gpUL115, gpUL128, gpUL130 and gpUL131 (Wang D. and Shenk T., PNAS 2005; 102:18153-18158). In addition these proteins are responsible for the transfer of HCMV from endothelial cells to leukocytes, representing major determinants of HCMV dissemination in vivo. Furthermore, these proteins seem to play a role in the priming of dendritic cells (DC) and are therefore critical elements for T-cell mediated immune response. CMV enters different cell types by distinct pathways. For fibroblast entry gpUL75/gpUL115 (gH/gL) or gpUL75/gpUL115/gpUL74 (gH/gL/gO) containing complexes are required. This is a pH-independent, non-endosomal infection pathway which could be blocked by neutralizing antibodies generated after vaccination with a Towne strain or gpUL55 (gB) adjuvant (MF59) based vaccine (Pass R. F., J. Clin. Virol, 2009; 46 (Suppl. 4), S73-76).

[0007] The second important pathway is an endosomal infection process of epithelial and endothelial cells which requires the pentameric complex gpUL75/gpUL115/gpUL128/gpUL130/gpUL131 (gH/gL/UL128/UL130/UL131A). This infection route can be blocked by neutralizing antibodies targeting the pentameric complex (Manley K. et al., Cell Host & Microbe 2011; 10:197-209). From the current state of knowledge different combinations of the above proteins are required to generate an efficient vaccine that stimulates a broad cellular and humoral immune response. However, the exact combination is not known. The importance of the proteins of the pentameric complex was addressed recently by Lilleri D. et al., PLoS One, March 2013; 8(3): e59863, 1-13.

[0008] Virus-like particles (VLPs) are stable, highly organised spheres that self-assemble from virus-derived structural antigens and thus have structural characteristics and antigenicity similar to the parental virus. In contrast to live attenuated viruses, the recombinant VLPs are safe and non-infectious since they do not contain replicating viral DNA. Therefore, they can be generated under biosafety level 1.

[0009] Several different viral vectors like adenoviral, retroviral, canarypox, vaccinia (poxvirus) and modified vaccinia virus ankara (MVA) vectors were so far used to express foreign antigens for pharmaceutical development as vaccines (Wang Z. et al., J. of Virology 2004; 3965-3976; Jie Zhong et al., Plos One 2008; 3(9):e3256). Most of the above mentioned vectors are replication competent, especially the retrovirus based vectors (Dalba C. et al., Mol. Ther. 2007; 15(3):457-466). Recombinant VLPs however do not have any risks associated with virus replication or inactivation as other vaccine types have. VLPs provide, on the basis of their particulate nature, an inherent advantage over soluble antigens in respect to immunogenicity and stability. Compared to subunit or single recombinant proteins, VLPs are more immunogenic and are able to stimulate B-cell mediated immune responses as well as CD4 proliferative and CTL responses (Ludwig C. and Wagner R., Curr. Opin. Biotechnol. 2007; 18:537-545). The size of VLPs appears to be favourable for uptake by dentritic cells (DC) through endocytosis or macropinocytosis and activating innate and adaptive immune response. VLPs, especially retroviral VLPs (gag-VLPs), contain immunogenic epitopes and are supposed to stimulate cellular immune responses via MHC class-I and MHC class-II pathways (Demi L. et al., Mol. Immunol. 2005; 42:259-277). Because of these immunogenic properties VLPs do not appear to require the use of adjuvants to achieve potent immune stimulation. VLPs have been extensively, and quite successfully, used as vaccine (WO 2005/123125) and viral serology reagents.

[0010] For enveloped viruses, VLPs require at least one capsid or matrix protein for the assembly of a viral particle. The proteins assemble in different cellular compartments such as endoplasmic reticulum (ER), lipid rafts or plasma membrane where the budding takes place, and thus contain the cellular lipids building the viral lipoprotein envelope. The VLPs may also include host cell proteins, e.g. lipid raft associated gangliosides. VLPs can be exploited for presentation of foreign epitopes and/or targeting molecules based on single or multicomponent capsids. The core gene of hepatitis B virus fused with antigens provided an early example of the VLP approach (WO 1999/057289). To date no recombinant CMV VLP has been generated. The largest VLPs generated and published are Influenza, Bluetongue and Rotavirus VLPs that contain up to 5 different proteins. It is not exactly known how many and which proteins are necessary to form a recombinant CMV particle based on CMV capsid proteins. In contrast, many non-herpesvirus capsid proteins are known to form VLPs. The most prominent example is the retroviral precursor protein gag, in particular MoMuLV (Moloney Murine Leukemia Virus), HIV (Human Immunodeficiency virus), HTLV (Human T-Cell Leukemia Virus) and SIV (Simian Immunodeficiency Virus) gag. The pr55 HIV precursor protein forms a VLP with a size of 100-120 nm and was shown to serve as carrier for further proteins The MoMuLV precursor protein gag (pr65) leads to VLPs with a size of 115-150 nm in a high yield based on immunoblotting and ELISA assays.

[0011] The baculovirus expression vector system (BEVS) is highly suitable for the co-infection and co-expression of proteins for the production of vaccines or other biologics, since its genome and virus structure allows for large, foreign gene insertions. It is safe due to the narrow host range, restricted primarily to Lepidopteran species (moths and butterflies). The primary production host are insect cells, however, the baculovirus can also be applied for recombinant co-expression in mammalian cells. The baculovirus system is a widely used and highly efficient system for protein expression in research and commercial laboratories around the world (Roldao A. et al., Expert Rev. Vaccines, 2010; 9(10):1149-1176). GlaxoSmithKline's human papillomavirus (HPV) VLP vaccine is produced in BEVS and approved for use in the USA and the European Union (WO 2005/123125).

[0012] WO 2010/128338 discloses CMV vaccines comprising Herpes Simplex Virus (HSV) or a HSV virus-like particle (HSV VLP) further comprising a Human Cytomegalovirus (HCMV) polyepitope.

### SUMMARY OF THE INVENTION

[0013] The invention relates to a recombinant virus-like particle comprising one or more capsid or capsid precursor proteins, 3, 4, 5 or more different surface proteins from cytomegalovirus (CMV), and optionally one or more tegument proteins.

[0014] Preferably the capsid proteins are derived from a herpes virus such as cytomegalovirus, e.g. human cytomegalovirus (HCMV), or from a retrovirus, in particular HIV or MoMuLV. Preferred capsid protein is the HIV and/or MoMuLV precursor gag protein.

[0015] The surface proteins (also termed envelope proteins) are preferably selected from HCMV, in particular from the group consisting of gpUL75 (gH), gpUL115 (gL), gpUL55 (gB), gpUL74 (gO), gp100 (gM), gp73 (gN), gpUL128, gpUL130, and gpUL131A. Likewise the tegument proteins are preferably selected from HCMV, in particular from the group consisting of pUL32, pUL45, pUL47, pUL48, pUL69, pUL71, pUL72, pUL76, pUL77, pUL83 (pp65), pUL88, pUL93, pUL94, pUL95, pUL97, pUL99, and pUL103. The core proteins are in particular selected from the group consisting of pUL23, pUL24, pUL33, pUL36, pUL38, pUL43, pUL78, pUL82, pUL96, IRS1, US22, and TRS1 having either tegument or envelope protein character. Likewise the regulatory proteins are preferably selected from the group of IE-1, UL50, UL80.5, UL46 and UL47.

[0016] The recombinant virus-like particle according to the invention may further comprise B- and/or T-cell epitopes, proteins selected from the group consisting of additional foreign antigenic sequences, cytokines, CpG motifs, g-CMSF, CD19, and CD40 ligand, and/or fluorescent proteins, proteins useful for purification purposes of the particles or for attaching a label, and/or proteinaceous structures required for transport processes.

[0017] Furthermore the invention relates to a DNA encoding the proteins comprised in the virus-like particles according to the invention, to a vector comprising such DNA, in particular a baculovirus vector, and a host cell comprising such a vector, and to methods of manufacturing virus-like particles according to the invention using a baculovirus vector.

[0018] Furthermore the invention relates to a vaccine comprising a recombinant virus-like particle according to the invention, in particular to such a vaccine further comprising the pentameric complex consisting of gpUL75, gpUL115, gpUL128, gpUL130 and gpUL131A, and/or soluble CMV protein selected from the group consisting of gpUL75, gpUL115, gpUL55, gpUL74, gpUL100, and gpUL73; or gpUL128, gpUL130, and gpUL131A; or pUL83, IE-1, UL99, UL91, and pp150. Such a vaccine may further comprise an adjuvant selected from the group consisting of aluminium hydroxide, alum, AS01, AS02, AS03, ASO4, MF59, MPL, QS21, ISCOMs, IC31, unmethylated CpG, ADVAX, RNA containing formulations and Freund's reagent, but also DNA of the invention as defined above.

[0019] In a particular embodiment, the vaccine comprises CMV proteins from different CMV strains selected from the group of Towne, Toledo, AD169, Merlin, TB20, and VR1814 strains.

[0020] The vaccine comprising a recombinant virus-like particle according to the invention may be further enhanced in its induction of host immune response by a second immunization with the pentameric complex consisting of gpUL75, gpUL115, gpUL128, gpUL130, and gpUL131A in a prime-boost administration, and/or with a soluble CMV protein selected from the group consisting of gpUL75, gpUL115, gpUL55, gpUL74, gpUL100, gpUL73, pUL83, and IE-1 in a prime-boost administration.

[0021] Alternatively, the vaccine comprising a recombinant virus-like particle according to the invention may be further enhanced in its induction of host immune response (humoral and cellular response) by addition of the soluble complexes consisting of at least two different surface proteins out of the group consisting of gpUL73, gpUL74, gpUL75, gpUL100, gpUL115, gpUL128, gpUL130, and gpUL131A.

### BRIEF DESCRIPTION OF THE FIGURES

[0022] FIG. 1: Schematic representations of recombinant vectors for expression of different variants of CMV virus-like particles, either based on a herpesvirus or non-herpesvirus capsid, or for expression of CMV-pentameric complex and soluble CMV proteins. The different variants are inserted into the vector backbone pRBT136 aimed at recombinant protein expression using the baculovirus expression system (BEVS) and containing two promoters P1 and P2 ( [symbol] _p10, [symbol] _polh) and two terminator sequences T1 and T2 (T), which are SV40 and HSVtk. For propagation in yeast the vectors contain an origin of replication (O), e.g. 2 micron, and a marker gene (m), e.g. URA3. Furthermore the vectors contain the transposon sites left (TL) and right (TR) for transposition of the transgenes from the transfer vector into bacmids, a loxP site (L) for site specific homologous recombination (plasmid fusion), origins of replication (O), ampicillin (A), chloramphenicol (C) and gentamycin (G) resistance genes, and defined restriction sites. For the expression in mammalian cells, either by transduction with a baculovirus or transient expression, the vector backbone pRBT 393 contains in addition a promoter selected from pCMV, ie1 and lef2, and a terminator selected from SV40pA, BHG pA and HSVtk.

[0023] Abbreviations: c: consensus sequence; H: His-tag; SH: Streptavidin-His-tag; V: strain VR1814, pcI: precission protease, poll: precission and TEV protease, DT: dimerization tool, T: terminator, O: origin of replication, G: gentamycin resistance, C: chloramphenicol resistance, L: loxP site, TL: left transposon side, TR: right transposon side. The previous, shorter HCMV nomenclature (gB, gH, gL, gO as well as “UL” without prefix and UL48 without suffix “A”) is used. Genes are labelled only with their numbers, e.g. “83” instead of “UL83”.

[0024] FIG. 2: Glycerol-tartrate gradient based purification of a CMV-VLP variant SEQ ID NO:7 combined with SEQ ID NO:14.

[0025] (A) Glycerol-tartrate gradient based purification. Analysis of different fractions of CMV-VLP variant comprising the capsid, functional, tegument and surface proteins UL86-UL85-UL50-UL48A-UL46-UL74(gO)-UL83-UL80.5-UL75(gH)-UL115(gL)-UL128(c)-UL130-UL131A (SEQ ID NO: 7 and SEQ ID NO:14) from the Towne strain by SDS-PAGE (4-12% Bis-Tris gel) followed by immunoblotting. A mouse anti-pUL83 (Virusys) antibody was used for verification of the tegument protein. On the left side a protein standard in kDa is shown; lanes 1 to 13: fractions 1 to 13 (top to bottom fractionation), lane 14: positive control.

[0026] (B) Verification of the immunoblot data by ELISA assay using specific antibodies against capsid (UL86, UL85), tegument (UL83) and surface UL75 (gH1, gH2) proteins. Presence of two capsid, a tegument protein (UL83) and surface protein UL75 (gH) could be shown by antibody binding to the selected proteins (UL86, UL85, gH2: University of Alabama, pUL83: Virusys; gH1: Santa Cruz). The presence of baculoviruses was verified with an antibody against the protein gp64 (eBioscience). Number 1-13 of the x-axis represents the number of the glycerol-tartrate gradient (fractionated from top to bottom), number 14 represents a positive and number 15 a negative control. Binding strength of antibody to protein in the VLPs is shown as optical density (OD) at the y-axis. Detection of the selected proteins in the same fractions showed their co-localization and therefore intact CMV-VLPs. Similar results were obtained for the expression and purification of the variants SEQ ID NO:7 combined with SEQ ID NO:9, SEQ ID NO:10 and SEQ ID NO:13.

[0027] FIG. 3: Glycerol-tartrate gradient based purification of a CMV-VLP variant SEQ ID NO:5 combined with SEQ ID NO:14.

[0028] Verification of immunoblot data by ELISA assay using specific antibodies against the capsid proteins UL86 and UL85, against the tegument protein UL83 (UL83) and surface protein UL75 (gH). Presence of capsid (UL86, UL85), tegument (UL83) and surface protein UL75 (gH) could be shown by antibody binding to the selected proteins (UL86, UL85, gH1: antibody provided by University of Alabama, UL83: Virusys; gH2: Santa Cruz). The presence of baculoviruses was verified with an antibody against the protein gp64 (eBioscience). Number 1-13 of the x-axis represents the number of the glycerol-tartrate gradient (fractionated from top to bottom), number 14 represents a positive and number 15 a negative control. Binding strength of antibody to protein in the VLPs is shown as optical density (OD) at the y-axis. Detection of the selected proteins in the same fractions showed their co-localization and therefore intact CMV-VLPs.

[0029] The CMV VLPs composed of SEQ ID NO:5 and SEQ ID NO: 13 led to nearly identical data. To verify the composition of the surface proteins the CMV VLPs generated on the basis of SEQ ID NO: 5 combined with SEQ ID NOs: 9 or 10 were treated in the above mentioned way and showed similar OD values within a range of 0.1-0.3.

[0030] FIG. 4: Glycerol-tartrate gradient based purification of a CMV-VLP variant SEQ ID NO:3 combined with SEQ ID NO:18.

[0031] Verification of immunoblot data by ELISA assay using specific antibodies against capsid protein (UL85), tegument (UL83) and surface (UL75 (gH), UL55 (gB)) proteins. Presence of capsid (UL85), tegument (pUL83) and surface proteins (gpUL75, gpUL55) could be shown by antibody binding to the selected proteins (UL85/UL55 (gB1): University of Alabama; UL83/UL55 (gB2): Virusys; UL75 (gH): Santa Cruz). Number 1-7 of the x-axis represents the number of the glycerol-tartrate gradient fraction 1 to 7 (fractionated from top to bottom), number 8 represents a negative control. Binding strength of antibody to protein in the VLPs is shown as optical density (OD) at the y-axis. Detection of the selected proteins in the same fractions showed their co-localization and therefore intact CMV-VLPs. The same intact composition was observed by combining SEQ ID NO:3 with SEQ ID NO:9, 10, 16 or 19 where the OD value detection differs in a range between 0.1-0.4.

[0032] FIG. 5: Glycerol-tartrate gradient based purification of a CMV-VLP variant SEQ ID NO:2 combined with SEQ ID NO:18.

[0033] Verification of immunoblot data by ELISA assay using specific antibodies against tegument (UL83) and surface (UL75, UL55) proteins. Presence of a tegument protein (UL83) and surface protein (UL75, UL55) could be shown by antibody binding to the selected proteins (UL83/UL55 (gB): Virusys; UL75 (gH): Santa Cruz). The presence of baculoviruses was verified with an antibody against the protein gp64 (eBioscience). Number 1 of the x-axis represents the sample of the pre-purification by sucrose cushion, lanes 2-14 of the x-axis represents the number of the glycerol-tartrate gradient fractions 1 to 13 (fractionated from top to bottom), number 15 represents a negative control for VLPs and number 16 a negative control for baculoviruses. Binding strength of antibody to protein in the VLPs is shown as optical density (OD) at the y-axis. Detection of the selected proteins in the same fractions showed their co-localization and therefore intact CMV-VLPs. The same proteins as mentioned above could be verified as well in the CMV VLP variants composed of SEQ ID NO: 2 for the capsid and tegument and SEQ ID NO: 9, 10, 16 or 19 for the surface proteins in a range of 0.1-0.3 OD values.

[0034] FIG. 6: Sucrose gradient based purification of non-herpesvirus capsid based CMV-VLP variant SEQ ID NO:20 combined with SEQ ID NO:14.

[0035] (A) Sucrose gradient based purification. Analysis of different fractions of CMV-VLP variant comprising the capsid (retroviral precursor) protein gag and surface proteins UL75 (gH)-UL115 (gL)-UL128(c)-UL130-UL131A (SEQ ID NO:20 and SEQ ID NO:14) by SDS-PAGE (4-12% Bis-Tris gel) followed by immunoblotting. A mouse anti-gag (DakoCytomation) antibody was used for verification of the capsid protein. Left of the graphic a protein standard in kDa is shown; lanes 1 to 13: fractions 1-13, lane 14: positive control (gag protein).

[0036] (B) Verification of the immunoblot data by ELISA assay using specific antibodies against capsid (gag) and surface (UL75 [gH], streptavidin tagged gL) proteins. Presence of the capsid protein (gag) and surface proteins (gH, gL via streptavidin tag) could be shown by antibody binding to the selected proteins (gag: DakoCytomation; UL75 (gH): Santa Cruz, streptavidin: AbD Serotec). Number 1-13 of the x-axis represents the number of the sucrose gradient fractions 1 to 13 (fractionated from top to bottom), number 14 represents a negative control for VLPs, number 15 a negative control for baculoviruses and number 16 a positive control. Binding strength of antibody to protein in the VLPs is shown as optical density (OD) at the y-axis. Detection of the selected proteins in the same fractions showed their co-localization and therefore intact CMV-VLPs. The same co-localization could be observed by combining the capsid protein gag (SEQ ID NO:20) with the tegument and surface proteins of SEQ ID NO: 9, 10, 13, 15, 16 or 19. The inclusion of SEQ ID NO: 19 showed in general higher OD values indicating better stability of the CMV VLP.

[0037] FIG. 7: Sucrose gradient based purification of non-herpesvirus capsid based CMV-VLP variant SEQ ID NO:20 combined with SEQ ID NO:18.

[0038] (A) Sucrose gradient based purification. Analysis of different fractions of CMV-VLP variant comprising the capsid (retroviral precursor) protein gag and surface proteins UL75-UL115-UL128-UL130-UL131A-UL55 (SEQ ID NO: 20 and SEQ ID NO:18) by SDS-PAGE (4-12% Bis-Tris gel) followed by immunoblotting. A mouse anti-gag (DakoCytomation) antibody was used for verification of the capsid protein. On the left side a protein standard in kDa is shown; lane 1 to 13 correspond to the fractions 1 to 13 from top to bottom fractionation of the gradient and lane 14 represents a positive control.

[0039] (B) Verification of the immunoblot data by ELISA assay using specific antibodies against capsid (gag) and surface proteins (UL75 [gH], UL55 [gB]). Presence of the capsid protein (gag) and surface proteins (UL75 [gH], UL55 [gB]) could be shown by antibody binding to the selected proteins (gag: DakoCytomation; gB: Virusys; gH: Santa Cruz). The presence of baculoviruses was verified with an antibody against the protein gp64 (eBioscience). Number 1-13 of the x-axis represents the number of the sucrose gradient fractions 1 to 13 (fractionated from top to bottom), number 14 represents the load of the gradient and number 15 a positive and number 16 a negative control. Binding strength of antibody to protein in the VLPs is shown as optical density (OD) at the y-axis. Detection of the selected proteins in the same fractions showed their co-localization and therefore intact CMV-VLPs. A further CMV variant based on the expression of SEQ ID NO:22 and SEQ ID NO:18 led to similar results with the benefit to support the induction of cellular immune response by the protein UL83.

[0040] FIG. 8: Analysis of the His/Strep-tagged CMV-VLP variant SEQ ID NO:7 combined with SEQ ID NO:14 purified by affinity chromatography.

[0041] The CMV-VLP variant comprising capsid, functional, tegument and surface proteins UL86-UL85-UL50-UL48A-UL46-UL74-UL83-UL80.5-UL75-UL115(H is/Strep)-UL128(c)-UL130-UL131A (SEQ ID NO:7 and SEQ ID NO:14) was purified with an IMAC procedure. Analysis of different steps of this IMAC-purification by SDS-PAGE (4-12% Bis-Tris gel) followed by immunoblotting against the tegument protein (UL83) using a mouse-anti-UL83 antibody (Virusys). On the left side a protein standard in kDa is shown. Lane 1: VLP before purification (load), lane 2: flowthrough (FT), lane 3: wash; lanes 4 to 9: elution with increasing amount of imidazole (55, 100, 150, 230, 480, 500 mM), lane 10: insect cells (Sf9) as negative control, lane 11: positive control (infected Sf9 cells). Presence of the tegument protein indicated by an arrow (UL83).

[0042] FIG. 9: Analysis of the His/Strep-tagged non-herpesvirus capsid based CMV-VLP variant SEQ ID NO:20 combined with SEQ ID NO:14 purified by affinity chromatography.

[0043] The CMV-VLP variant comprising the capsid (retroviral precursor) protein gag and surface proteins UL75-UL115(His/Strep)-UL128(c)-UL130-UL131A (SEQ ID NO:20 and SEQ ID NO:14) was purified with an IMAC based procedure. Analysis of different steps of this IMAC-purification by SDS-PAGE (4-12% Bis-Tris gel) followed by immunoblotting against the capsid protein (gag, FIG. 9A) using a mouse-anti-gag antibody (DakoCytomation) and against the streptavidin-His tagged surface protein UL115 (gL, FIG. 9B). On the left side a protein standard in kDa is shown, lane 1: VLP before purification (load), lane 2: flowthrough (FT), lane 3: wash; lane 4 to 9: elution with increasing amount of imidazole (55, 100, 150, 230, 480, 500 mM), lane 10: insect cells (Sf9) as negative control, lane 11: positive control (infected Sf9 cells). Presence of the capsid protein (gag) as well as the presence of the streptavidin-histidine tagged surface protein gL indicated by an arrow.

[0044] FIG. 10: Analysis of purification process consisting of two affinity chromatography steps, followed by size exclusion chromatography of the His-tagged soluble CMV-pentameric complex.

[0045] The pentameric complex comprising the surface proteins UL75 (His-tagged, gH)-UL115 (gL)-UL128-UL130-UL131A (SEQ ID NO: 59) was purified by an affinity based chromatography (IMAC) using His-Trap columns, followed by size exclusion chromatography (XK16/60 Superdex200pg).

[0046] (A) 2^{nd} IMAC purification was analysed by SDS-PAGE (4-12% Bis-Tris gel) followed by coomassie-staining. The sizes (kDa) of the protein standard (lane 1) are marked on the left side. Lane 2: pool of 1^{st} IMAC (load of the 2^{nd} IMAC process), lane 3: flowthrough, lane 4: wash, lanes 5-14 representing elution fractions with increasing imidazole concentration up to 500 mM.

[0047] (B) Analysis of size exclusion chromatography purification by SDS-PAGE (4-12% Bis-Tris gel) followed by coomassie-staining. The sizes (kDa) of the protein standard (lane 1) are marked on the left side. Lane 1: elution pool IV-2, precipitated; lane 2: elution pool IV-2, non precipitated; lane 3: elution pool IV-3; lane 4: elution pool V; lane 5: elution pool VI; lane 6: size marker. Indicated by an arrow are the proteins of the pentameric complex (gH, gL, UL128, UL130, UL131A).

[0048] (C) Immunoblot using antibody against the His-tag of gH. Lane 1 represents the elution pool IV-2 (precipitated); lane 2: elution pool IV-2 (non precipitated); lane 3: elution pool IV-3; lane 4: elution pool V; lane 5: elution pool VI; lane 6: positive control. The His-tagged gH protein is marked on the right side.

[0049] FIG. 11: Electron micrograph of HCMV-VLP variant SEQ ID NO:7 and SEQ ID NO:10 (A) and SEQ ID NO:48 and SEQ ID NO:19 (B).

[0050] (A) Electron micrograph of recombinant human CMV-VLPs comprising the capsid, functional proteins, tegument proteins and surface proteins UL86-UL85-UL50-UL48A-UL46-UL83-UL80.5-UL74-UL75-UL115-UL128(c)-UL130-UL131A (SEQ ID NO:7 and SEQ ID NO:10) by negative staining with phosphor tungsten acid. The scale bar corresponds to 100 nm.

[0051] (B) Electron micrograph of recombinant human CMV-VLPs comprising the capsid, capsid assembly supporting proteins, tegument proteins and surface proteins UL86-UL85-UL83-UL80.5-UL74-UL75-UL115-UL128-UL130-UL131A-UL55 (SEQ ID NO:48 and SEQ ID NO:19) by negative staining with phosphor tungsten acid. The scale bar corresponds to 200 nm.

[0052] FIG. 12: Electron micrograph of non-herpes virus based CMV-VLP variant SEQ ID NO:20 and SEQ ID NO:10 (A) and SEQ ID NO:88 and SEQ ID NO:19 (B).

[0053] (A) Electron micrograph of recombinant human CMV-VLPs comprising the capsid (retroviral precursor) protein gag and surface proteins UL75-UL115-UL128(c)-UL130-UL131A (SEQ ID NO:20 and SEQ ID NO:10) by negative staining with phosphor tungsten acid. The scale bar corresponds to 100 nm.

[0054] (B) Electron micrograph of recombinant human CMV-VLPs comprising the capsid (retroviral precursor) protein MoMULV gag and surface proteins UL75-UL115-UL128-UL130-UL131A-UL55-UL83 (SEQ ID NO:88 and SEQ ID NO:19) by negative staining with phosphor tungsten acid. The scale bar corresponds to 100 nm.

[0055] FIG. 13: Virus neutralization assay with mouse sera based on in vivo studies with a vaccine combination of SEQ ID NO:59 and SEQ ID NO:22 with SEQ ID NO:18, respectively.

[0056] Balb/C mice were immunized in a prime-boost-boost regimen with hCMV antigens. The selected antigen for this neutralization assay is a protein mix of the soluble complex (SEQ ID NO:59) and the VLP composed of a retroviral capsid in combination with the tegument protein UL83 (SEQ ID NO:22) and the CMV proteins UL55-UL75-UL115-UL128-UL130 and UL131A. Pooled sera obtained from eight mice in a two-fold serial dilution (1:20 to 1:2560) were mixed with a recombinant, BAC-reconstituted VR1814 HCMV strain expressing EGFP under the CMV promoter. MRC-5 fibroblasts (2×10⁴ cells/well) were used to assess the entry of this virus in a cell-based fluorescence assay, 96 h post treatment. The relative fluorescence intensities (RFI, %) are depicted for selected sera dilutions from mice immunized with a mixture of non-herpes CMV-VLP and the pentameric CMV complex. An empty baculovirus and PBS were used as control. The immunisation with a mix of soluble pentameric complex and a non-herpesvirus based CMV VLP induced the generation of neutralising antibodies within a titer range of 1:160 to 1:320 comparable with titers of human blood donors using the pre-evaluated TCID₅₀ for the used EGFP-virus.

[0057] 1: w/o serum, 2: 1:320, 3: 1:160, 4: 1:80. Mix: pentamer and VLP; BV: baculovirus.

[0058] FIG. 14: Neutralization assay to verify humoral immune response based on SEQ ID NO:59

[0059] Comparison of neutralizing antibody titers of human CMV blood donors and mouse sera. Serum from five positive (Group G2, D6-D10) and five negative (Group G1, D1-D5) HCMV blood donors in a two-fold serial dilution (1:20 to 1:2560) were subjected to a cell-based fluorescence neutralization assay. The serum dilution (s.d.) that gave the same inhibitory effect as a 1:320 dilution of pooled sera obtained from eight mice previously immunized with the pentameric complex (SEQ ID N0:59) is shown. The separate analysis of the soluble pentameric complex, as one component in the antigen mix used for immunization of mice, showed the induction of neutralizing antibodies in comparison to human blood donors.

[0060] PR: pentamer pre-immune, PO: pentamer post-immune, G1: negative blood donors, G2: positive blood donors.

[0061] FIG. 15: Quality control of one component (soluble complex, SEQ ID NO: 59) of the vaccine candidate containing the soluble complex and reVLP (recombinant VLP, SEQ ID NO:22 with SEQ ID NO:18).

[0062] Fractions eluted with different amounts of imidazole are shown after being subjected to an IMAC-based purification. They were tested for the presence of UL75 (gH) and the His tag on gH. The similarity in signal intensity designates the intactness of gH and therefore of the whole complex composed of UL75-UL115-UL128-UL30-UL131A.

[0063] 1: load, 2: flowthrough, 3: wash, 4: 250 mM imidazole, 5-8: 300 mM imidazole, 9-13: 350 mM imidazole, 14: positive control, 15: negative control

[0064] FIG. 16: Quality control of one component (soluble complex, SEQ ID NO: 59) of the vaccine candidate containing the soluble complex and the reVLP (recombinant VLP, SEQ ID NO:22/18) using conformation-dependent antibodies.

[0065] Different production batches of the complex were tested with a sandwich ELISA assay for the co-presence of the designated proteins. Samples were captured with an anti-gH1 (UL75) antibody and detected with an anti-gH2 and an anti-His as well as anti-UL130/131A and anti-UL130 conformation-dependent (UL130/UL131A) antibodies. The signals confirm co-existence of the proteins in a complex, intactness of the complex, as well as reproducibility of its production.

[0066] 1: batch 451-pool 1, 2: batch 459-pool 2, 3: batch 459-pool 1 (15 mM EDTA), 4: batch 459-pool 1 (20 mM EDTA), 5: batch 458 (15 mM EDTA), 6: positive control, 7: negative control, 8: internal standard

[0067] FIG. 17: Validation of a non-herpes-based CMV-VLP (SEQ ID NO: 22 combined with SEQ ID NO: 18) with sandwich ELISA assay.

[0068] Different elution fractions were tested for the co-presence of the designated proteins. Samples were captured with a conformation dependent antibody (UL130/UL131A) giving an indication that the surface proteins UL130 and UL131A are presented in the natural conformation. An anti-gH (UL75), an anti-gpUL83 (pp65) and an anti-capsid (gag) antibody were used for detection. The signals confirm co-existence of proteins on a VLP, and reveal the enrichment of some samples in the proteins tested.

[0069] 1: bulk, 2: fraction 7, 3: fraction 8, 4: fraction 9, 5: fractions 8+9, 6: negative control. nOD: normalized OD, cap: capsid.

[0070] FIG. 18: Characterization of a purification process of a non-herpes-based CMV-VLP (SEQ ID NO: 22 combined with SEQ ID NO: 18) with a sandwich ELISA assay.

[0071] Elution fractions from two different chromatography matrices (monolith: c1 and membrane adsorbers: c2) were tested for the co-presence of the designated proteins. Samples were captured with a conformation-dependent (UL130/UL131A) antibody and detected with an anti-gH, an anti-pp65, an anti-gB and an anti-gag (capsid) antibody. The signals confirm co-existence of the proteins on a VLP, and reveal the better performance of the membrane adsorber (c2) used.

[0072] 1: elution fraction from column 1 (c1), 2: elution fraction from column 2 (c2), 3: positive control, 4: negative control. Cap: capsid (precursor gag protein).

[0073] FIG. 19: Characterization of a herpes-based CMV-VLP with sandwich ELISA assay.

[0074] VLPs were produced with two (FIG. 19A, UL86 and UL80.5, SEQ ID NO:2) or three (FIG. 19B, UL86-UL85-UL80.5, SEQ ID NO:3) different capsid proteins; the same tegument protein UL83 (pp65) and different surface proteins (gH-gL-gB-UL128-UL130-UL131A, SEQ ID NO:18), and elution fractions from the subsequent purification step were subjected to sandwich ELISA. Samples were captured with a conformation-dependent (UL130/UL131A) antibody against surface proteins and detected with antibodies against tegument and surface proteins (anti-pp65, anti-gH and anti-gB). Both capsid types led to VLPs, yet with different yield. Integration of the gB protein appeared to be beneficial for the core consisting of more than three proteins. 1: bulk, 2-10: fractions 4-12, 11: negative control.

[0075] FIG. 20: Cellular immune response induced by a combination of a non-herpes CMV-VLP (SEQ ID NO:22/SEQ ID NO:18) and the pentameric CMV complex (SEQ ID NO:59). Spleen cells were re-stimulated 24 h post harvesting with various peptides (1-7), and the release of the Th1-type cytokines, IFN-g (A) and IL-2 (B), the Th2-type cytokines, IL-4 (C), IL-5 (D) and IL-10 (E), and the inflammatory cytokines, GM-CSF (F) and TNFa (G) was measured with a multiplex assay according to manufacturer's protocol (Invitrogen). Peptides 2-5 were a mixture of nonamers with predicted epitopes (SYFPEITHI program), whereas peptides 6 and 7 were commercially purchased (JPT, mix of pre-defined peptides). An empty baculovirus and PBS (mock) were used as controls for the restimulation.

[0076] 1: mock, 2: gH, 3: gB, 4: UL128/130, 5: UL131/gL, 6: pp65, 7: Gag capsid. Mix: pentamer and VLP; BV: baculovirus.

[0077] FIG. 21: Analysis of CMV VLPs and single components (soluble complex, SEQ ID NO:59) for a vaccine using human CMV positive sera.

[0078] Non-herpes virus based CMV VLP (SEQ ID NO:22 combined with SEQ ID NO:19), herpes virus based CMV VLPs (SEQ ID NO:48 combined with SEQ ID NO:19) and the soluble complex (SEQ ID NO:59) were tested in a sandwich ELISA assay for their ability to react with human antibodies from CMV-positive donors to simulate an in vivo experiment. Plates were coated with antibodies corresponding to different CMV proteins (gH, gB, UL83, UL85, UL86 and conformation-based UL130/UL131A), to Gag and to His. The plates were further incubated with either the soluble pentameric complex or VLPs and subsequently treated with CMV-positive human sera (HIV negative donors). An HRP-labeled secondary human anti-IgG was used for detection.

[0079] (A) The pentameric complex gH-gL-UL128-UL130-UL131A (SEQ-ID NO:59) was analyzed with human sera in a sandwich ELISA assay. gH and UL130/UL131A in the complex are recognized by human antibodies in donors' sera (mix of 4 different sera). 1:pentameric complex; 2: negative control (mock); (3) positive control (His-expressing protein).

[0080] (B) A gag-based CMV VLP gag-UL83-gL-gH-UL128-UL130-UL131A-gB-UL83 (SEQ-ID NO: 22 combined with SEQ-ID NO:19) was analyzed with human sera in a sandwich ELISA assay. UL83 in these VLPs is recognized by human antibodies in donors' sera. 1: Gag-based CMV VLP; 2: negative control (mock). Very similar results were obtained for a CMV VLP based on the MoMULV gag capsid (SEQ-ID NO: 88 combined with SEQ ID NO:19)

[0081] (C) A CMV-based VLP UL86-UL85-UL83-UL80.5-UL74-gL-gH-UL128-UL130-UL131A-gB-UL83 (SEQ-ID NO: 48 combined with SEQ-ID NO:19) was analyzed with human sera in a sandwich ELISA assay. All proteins in these VLPs were recognized by human antibodies in donors' sera with very clear signals for UL83, gH, UL85, UL86. 1: Gag-based CMV VLP; 2: negative control (mock). The remaining baculovirus in the CMV-VLP and soluble complex manufacturing did not bind to the antibodies in present in human sera.

### DETAILED DESCRIPTION OF THE INVENTION

[0082] The invention relates to novel virus-like particles for use as anti-HCMV vaccine, for development of therapeutic antibodies, in anti-HCMV treatment, as diagnostic tools and as R&D tools. The present invention describes several possibilities to generate recombinant, non-infectious CMV-particles leading to a humoral and cellular immune response. Various protein combinations are generated in order to obtain a product with the desired properties. More specifically the present invention focuses on multicomponent VLP variants and combinations of different protein compositions such as VLPs, protein complexes, soluble proteins and/or DNA based compositions such as vectors and peptides.

[0083] The recombinant VLPs of the present invention are based on a capsid formed by either a CMV capsid protein combination of 1 to 6 proteins (major capsid, minor capsid, smallest capsid protein and necessary proteins for assembly) or on a retroviral precursor protein, in particular the one of the lentiviral human immunodeficiency virus (HIV) named gag, and/or pr55. Further proteins are added to these capsid proteins selected from CMV tegument proteins and surface proteins. The VLP formed is surrounded by an envelope provided by the host cell during the secretion process. In order to connect and/or embed the tegument and surface proteins in their natural conformation, their individual membrane anchors are present.

[0084] Since a CMV virus contains at least 5 capsid proteins (gene products of UL46, UL48A, UL85, UL86, UL104), 19 regulatory proteins, 17 tegument proteins (gene products of UL25, UL45, UL47, UL48, UL69, UL71, UL72, UL76, UL77, UL83, UL88, UL93, UL94, UL95, UL97, UL99, UL103), 5 surface or envelope proteins (gene products of UL55 [gB], UL73 [gN], U74 [gO], UL75 [gH], UL100 [gM], UL115 [gL]), the non-categorized gene products from the open reading frame UL128, UL130, UL131A; proteins from 15 beta-herpesvirus specific genes (UL23, UL24, UL32, UL33, UL35, UL36, UL38, UL43, UL74 [gO], UL78, UL82, UL96, IRS1, US22, TRS1) and so-called functional proteins from the open reading frames (ORF) UL50, UL80.5 known to date, theoretically up to 1×10⁶⁴ combinations would be possible and the largest VLP could contain more than 40 proteins, whereby the regulatory proteins are not taken into account. So far no recombinant CMV VLP exists due to the complexity of this virus.

[0085] In the present invention, the term “surface protein” is used, but is equivalent to the term “envelope protein”.

[0086] The invention relates to a recombinant virus-like particle comprising one or more capsid or capsid precursor proteins, 3 or more different surface proteins from cytomegalovirus (CMV), and optionally one or more tegument proteins.

[0087] In a preferred embodiment of the invention the surface proteins are selected from the group consisting of pUL83 (pp65), gpUL75 (gH), gpUL55 (gB), gpUL100 (gM), gpUL73 (gN), gpUL74 (gO), gpUL115 (gL), gpUL75 (gH), gpUL128, gpUL130, and gpUL131A, preferably from human CMV. Nevertheless proteins of non-human CMV strains may be used. Such non-human CMV proteins then may take a structural rather than an immunological function in the VLP. The recombinant VLPs according to the invention may comprise proteins from other herpesvirus families such as HSV (herpes simplex virus), EBV (Epstein-Barr virus) and KSHV (Kaposi's sarcoma-associated herpesvirus).

[0088] To address the species specificity, the different cell tropism and the induction of a broad immune response the VLPs of this invention contain more than one surface protein in combination with a number of capsid and tegument proteins.

[0089] In another preferred embodiment, the VLPs based on CMV capsid proteins are composed of one protein or of combinations of proteins selected from the six proteins pUL86, pUL85, pUL48A, pUL46, pUL50, and pUL80.5, for example two, three, four, five, or six of these proteins. In a further aspect of the invention the VLP comprises protein pUL104.

[0090] The non-herpesvirus capsid is chosen from the retroviridae out of the retroviral families, alpha-, beta-, gamma-, delta and epsilon retrovirus, the lentivirus family or the spumavirus family. Out of the lentiviral family the avian (SIV), feline (FIV), bovine (BIV) and the human (HIV) precursor protein gag (group-specific-antigens) is used as capsid for the generation of non-herpesvirus based VLPs as well as the precursor protein gag from the gamma retrovirus, like feline leukemia virus (FELV), moloney mouse leukemia virus (Mo-MuLV), avian leukemia virus (SLV) or the murine sarcoma virus (MSV). The VLPs based on a non-herpesvirus capsid are preferably composed of the HIV precursor protein gag (pr55), which is a precursor protein composed of a matrix (MA, p17), a capsid (CA, p24), a nucleocapsid (NC, p7) and a link (LI, p6) protein part.

[0091] It is known that there are no huge differences in the assembly of the gag precursor proteins from different retroviral family members. Besides the HIV gag the MoMULV gag variant, which is composed of the same subunits, is suitable as retroviral based capsid carrying more than three different CMV tegument and/or surface proteins for the formation of a CMV VLP, as well as having advantages in the manufacturing and regulatory approval of a vaccine. The assembly of CMV VLP variants based on the MoMuLV gag precursor protein is similar to the assembly of HIV gag based VLPs. There is no big advantage in respect to yield, better shape and conformation of the MoMULV gag based CMV-VLPs. However, in contrast to a HIV based CMV VLP human vaccine no false positive results in a diagnosis test for HIV are expected for a CMV-VLP vaccine based on a MoMuLV gag capsid.

[0092] A preferred VLP comprises, on top of the respective capsid proteins, one or two tegument proteins selected from the group consisting of UL83, UL25, UL32 (pp150), and UL99, and five to eight surface proteins. The surface proteins are preferably selected from the group consisting of UL75 (gH), UL115, (gL), UL74 (gO), UL55 (gB), UL128, UL130, and UL131AA. In a further embodiment of the invention the VLP may also contain UL100 (gM) and UL73 (gN). The surface proteins of the HCMV in the VLPs of the invention are selected together with their respective membrane anchor such that they are displayed and embedded in their natural conformation into the recombinant capsid structure.

[0093] In one embodiment the CMV capsid contains only the major capsid protein (UL86). In all other embodiments the capsid consists of more than one protein. In the preferred embodiment the VLP contains pUL86-pUL85-pUL80.5 in combination with tegument proteins pUL83 and ppUL32 (pp150) and the surface proteins gpUL75 (gH), gpUL115 (gL), gpUL55 (gB), gpUL128, gpUL130, and gpUL131A. With the same preference the mentioned tegument and surface proteins are expressed on a capsid composed of pUL86-pUL85-pUL48A improving the core and therefore the VLP shape.

[0094] In another preferred embodiment the VLP additionally comprises surface protein gpUL74 (gO). This enhances particle formation and enlarges the amount of proteins inducing protective immune response.

[0095] In a further aspect of this invention the capsid and tegument proteins are from another herpesvirus, such as herpes simplex virus, Epstein-Barr virus, HHV-6 (roseolovirus) or HHV-7 (pityriasis rosea).

[0096] In a further aspect of this invention the VLPs comprise at least one tegument protein and/or one surface protein of non-human CMV origin.

[0097] In another embodiment of this invention the VLPs comprise at least two different proteins fused to a peptide comprising a coiled-coiled motif, having a zipper function and connecting said at least two proteins carrying the corresponding motif. Preferred proteins fused to the peptide comprising a coiled-coiled motif are one of the capsid proteins, preferably UL86, and one of the surface proteins, preferably to gpUL75, to support the assembly into a functional VLP and to increase the amount of immunogenic proteins on the surface.

[0098] In one embodiment of the present invention the proteins for the generation of a multicomponent recombinant VLP are chosen from a single CMV strain, preferably selected from Towne, Toledo, AD169, Merlin, VR1814 strain, and/or clinical isolates. In another embodiment the proteins for the generation of the VLPs are selected from different CMV strains, preferably from Towne, Toledo, AD169, Merlin, VR1814 strains and/or different clinical isolates.

[0099] VLPs comprising protein sequences from different CMV strains confer protection against several strains and prevent re-infection and/or re-activation with similar strains. Different CMV strains considered are Towne, Toledo, AD169, Merlin, TB20, and VR1814 strains, but also other clinical isolates.

[0100] These strains are considered for several reasons, such as existing data of clinical phase II studies with vaccine candidates using Towne and Toledo strains, well characterized AD169 based data and commercially available tools for analysis of the manufacturing process. Furthermore the clinical isolate VR1814 contains functional complexes which are important for entry into different cell types such as fibroblasts and epithelial/endothelial cells. For the bacterial artificial chromosome (BAC) derived and laboratory adapted Towne strain it is known that the entry into epithelial cells is blocked because of non-functional protein compositions on the surface. By combining different strains in the recombinant CMV VLPs the natural malfunctions are circumvented. Merlin and TB20 are now more often used as reference strains. New technologies such as next-generation sequencing allow the determination of immunogenic epitopes from CMV positive donors. The genetic information of the corresponding virus (clinical isolate) is used to generate an improved vaccine. Therefore the CMV VLPs are composed of proteins from different virus strains.

[0101] Preferred are Towne and VR1814 combinations of protein sequences, in particular in a VLP composed of gpUL55, gpUL74, gpUL75, gpUL115, UL128, UL130, and UL131A, and either CMV capsid protein(s) or retroviral gag capsid protein.

[0102] The protein compositions of the invention contain immunogenic proteins and therefore a number of different epitopes, preferably of the kind that stimulate humoral and cellular immune responses. The activation of humoral immune responses by epitopes leads to the production of antibodies that will bind to proteins containing such epitopes. The activation of cellular immune responses by epitopes leads to the production of cytotoxic T cells (also known as T_{c}, CTL, T-Killer cell, cytolytic T cell, CD8+ T-cell, or killer T cell) which kill cells presenting such epitopes on their surface. Epitopes as understood herein may be repetitive, and may be part of a larger protein, in particular part of an antigen.

[0103] Different proteins comprising epitopes of the invention are, for example, gpUL75 (gH), gpUL115 (gL), UL128, UL130, UL131A, gpUL55 (gB), gpUL74 (gO), gpUL100 (gM), gpUL73 (gN), pUL86, pUL85, pUL80.5, pUL82, pUL83, pUL46, pUL48A, pUL50, pUL32, and the immediate early protein IE-1.

[0104] In a preferred embodiment the VLPs comprise epitopes from a single or from different HCMV strains and/or non-human CMV strains, combined with B- and/or T-cell epitopes in order to induce a broader immune response.

[0105] VLPs comprising an inclusion of CD ligands (e.g. CD40L, CD19L) are another aspect of the present invention. Such VLPs induce the immune response via a distinct pathway resulting in a Th1 or Th2 answer.

[0106] A further aspect of the present invention are VLPs comprising CpG motives, cytokines, and/or betaglucans, Such VLPs directly trigger B-cell activation, and enhance and broaden the immune response caused by the specific HCMV epitopes.

[0107] In another preferred embodiment the virus-like particle consists of proteins forming a complete virus-like surface, optionally further comprising a viral capsid protein. The virus-like particle of the invention may further comprise fluorescent proteins, proteins useful for purification purposes of the particles or for attaching a label, and proteinaceous structures required for transport processes.

[0108] The invention relates to a recombinant virus-like particle comprising multiple combinations of capsid, optionally tegument and/or surface proteins from non-human and/or human cytomegalovirus in different amounts. These particles contain at least a capsid protein, preferably the major capsid protein UL86, a tegument protein selected from the group of ppUL 83, ppUL32, pUL25, and the IE-1 protein, and a surface protein selected from the group consisting of gpUL75 (gH), gpUL115 (gL), gpUL128, gpUL130, gpUL131A, gpUL55 (gB), gpUL74 (gO), gpUL100 (gM), and gpUL73 (gN). The surface proteins are preferably of human viral origin. The virus-like particles of this invention consist either of one or more, such as one to sixteen proteins comprising various proteins selected either (a) from one HCMV strain or (b) from different HCMV strains and/or (c) from non-human CMV like mouse or guinea pig CMV. Preferred are recombinant virus-like particles comprising one or more, preferably two or more different proteins from a single HCMV strain or different proteins from different CMV strains. Likewise preferred are recombinant virus-like particles comprising one or more capsid proteins, the tegument proteins pUL83 and ppUL32, and the surface proteins gpUL55 (gB), gpUL74 (gO) and/or the proteins forming a pentameric structure selected from the group consisting of gpUL75 (gH), gpUL115 (gL), gpUL128, gpUL130, and gpUL131A. The recombinant virus-like particles of this invention may also be based on a non-herpesvirus capsid, preferably on the lentiviral precursor protein gag, and further be composed of CMV surface proteins and optionally CMV tegument proteins.

[0109] In preferred embodiments a virus-like particle of the invention comprises:
[0110] a. one capsid protein from a single CMV strain or a non-herpesvirus strain;
[0111] b. a mix of two or more capsid proteins from a single CMV strain;
[0112] c. a mix of two or more capsid proteins from different CMV strains;
[0113] d. a combination of one capsid, one tegument and one surface protein from a single CMV strain;
[0114] e. a combination of one capsid, one tegument and one surface protein from different CMV strains;
[0115] f. a combination of one or more capsid proteins; one or more tegument proteins and one or more surface proteins from a single CMV strain;
[0116] g. a combination of one or more capsid proteins; one or more tegument proteins and one or more surface proteins from different CMV strains;
[0117] h. a combination of one or more capsid proteins, one or more tegument proteins, and one or more surface proteins from one or more CMV strains with additional T-cell epitopes;
[0118] i. a combination of one or more capsid proteins, one or more tegument proteins, and one or more surface proteins from one or more CMV strains excluding proteins responsible for immune evasion;
[0119] j. a combination of one or more capsid proteins, one or more tegument proteins, and one or more surface proteins from one or more CMV strains excluding proteins responsible for inhibition of MHCI and MHCII expression; and
[0120] k. a combination of one or more capsid proteins, one or more tegument proteins, and one or more surface proteins from one or more CMV strains further comprising proteins and/or motives enhancing the immune response, selected from the group of CD40L, CD19L, cytokines and unmethylated CpG motives;
[0121] l. a combination of one or more capsid proteins, one or more tegument proteins, and one or more surface proteins from one or more CMV strains with proteins facilitating purification and analysis, selected e.g. from the group consisting of His-tag, Strep-tag, myc-tag, Flag-tag, and Snap-tag, and fluorescence proteins, selected e.g. from the group consisting of GFP, YFP and Red-cherry;
[0122] m. a combination of one or more capsid proteins, one or more tegument proteins, and one or more surface proteins from one or more CMV strains comprising further proteinaceous or non-protein structures to couple chemicals and/or inert nanobeads.

[0123] The strategy presented in the current invention to obtain large and complex CMV VLPs includes co-expression of multiple genes from single vectors, including genes for CMV capsid, tegument and/or surface proteins, as well as co-infection of several of these co-expression vectors.

[0124] The production of these novel multicomponent virus-like particles, protein complexes and soluble proteins is based on the recombinant assembly technology (known as rePAX) which includes the following steps: the assembly of genes, the generation of expression constructs for various systems, the protein expression, purification and characterization of the product. The preferred expression system for the platform is the baculovirus system (BEVS) or the mammalian cell system. In another embodiment of the present invention a combination of both systems, known as BacMam, is used.

[0125] The herein described protein compositions such as VLPs, protein complexes and single proteins are generated in a shorter time and in unlimited amounts, due to the use of specific genetic and process engineering tools. The capability to assemble the required genes by modern molecular biology methods, such as the described rePAX technology and gene synthesis, for instance, allows fast assembly of the coding DNA vector. The use of these technologies does not require any physical transfer of original, potentially dangerous infectious or carcinogenic material during the development, manufacturing or administration of virus-like particles, protein complexes, and soluble proteins. Thus the vaccine of the invention is safe. For the construction of protein compositions of the invention it is sufficient to use nucleotide sequences from HCMV available at the NCBI database.

[0126] The DNA encoding the proteins forming the VLPs of the invention, and vectors, either viral or plasmid based, comprising such DNA, are also part of the invention.

[0127] For the generation of expression constructs for the BEVS system the vector backbone pRBT136, containing elements for propagation in E. coli and yeast (e.g. Saccharomyces cerevisae.) and for protein expression in insect cells are preferably used.

[0128] For expression in the mammalian system the vector backbone pRBT393 containing elements for gene assembly, homologous recombination and for expression in mammalian cells, preferably HEK293, CHO, human foreskin fibroblasts (HFF) and epithelial cells, are preferably used.

[0129] The parallel assembly of the different genes is conducted by homologous recombination of PCR products with homologous flanking regions and containing expression cassettes (promoter—gene of interest—terminator) or single genes fused together with protease cleavage sites such as the foot-and-mouse-disease virus 2A cleavage site into one open reading frame (ORF). The promoters are preferably selected from the group consisting of polh, p10 and p_{XIV} very late baculoviral promoters, vp39 baculoviral late promoter, vp39polh baculoviral late/very late hybrid promoter, pca/polh, pcna, etl, p35, egt, da26 baculoviral early promoters; CMV-IE1, UBc. EF-1, RSVLTR, MT, p_{DS47}, Ac5, and P_{GAL} and P_{ADH}. The terminators are preferably selected from the group consisting of SV40, HSVtk and BGH (bovine growth hormone).

[0130] The vector backbone pRBT136 used preferably for this invention contains an origin of replication for E. coli, e.g. pBR322ori, and yeast, e.g. 2 micron ori, the polh and p10 promoters for expression in insect cells, the terminators SV40 and HSVtk, several resistance markers (ampicillin, gentamycin), a yeast selection marker (URA3), transposon sites (Tn) and a multiple cloning site (MCS).

[0131] An expression cassette containing promoter—gene of interest—terminator is PCR amplified at the 5′ site with a 35-40 nt overhang at the 5′ site, and at the 3′ site with a further and different 35-40 nt overhang. For homologous recombination with a second expression cassette, having the same organization, the PCR product contains, at the 5′ site, the complementary sequence of the 35-40 nt overhang to the 3′ site of the previous PCR product. The remaining overhangs at the 5′ site of the first PCR product and the 3′ site of the second PCR product are homologous to the 3′ and the 5′ end of a linearized vector (pRBT136), respectively. The homologous recombinations in a sequence are then conducted in yeast, preferably in Saccharomyces cerevisiae. The number of the expression cassettes/PCR products to be assembled in parallel with the strategy described before is increased according to the needed number of genes to be assembled. By this means multiple genes/expression cassettes are assembled in parallel. The assembled genes are flanked by the transposon sites. These are used for transposition of the genes into the baculovirus genome. The resulting baculovirus co-expression vector ensures that the genes are co-expressed from the same single cell. Yield and product composition vary dependent on the number of proteins and production parameters. The production parameters such as cell line, cell count at infection (CCI), amount of recombinant virus inoculum (multiplicity of infection, MOD and time of harvest (TOH) are determined in respect to yield and early harvest using a matrix system and a small scale production system (2-20 ml; Ries, C., John C., Eibl R. (2011), A new scale down approach for the rapid development of Sf21/BEVS based processes—a case study. In Eibl R., Eibl D. (Editors): Single-use technology in Biopharmaceutical Manufacture, 207-213, John Wiley & Sons, Hoboken, N.J.). The defined parameters are then used to produce the respective product at larger scale. Particles of the invention are manufactured using modern disposable tissue culture techniques which allow for high production capacity.

[0132] The preferred production cell lines of this invention are insect cell lines such as Sf9, Sf21, Hi-5, Vankyrin (VE-1, VE-2, VE-3), Express Sf+, and S2 Schneider cells. For expression in mammalian cells, in particular human cells, e.g. HEK293, CHO, HeLa, Huh7, HepG2, BHK, MT-2, human foreskin fibroblasts (HFF), bone-marrow fibroblasts, primary neural cells, or epithelial cells are used. For expression in yeast S. cerevisiae, S. pombe, C. albicans, or P. pastoris cells are used.

[0133] Cultivation and propagation of host cells according to the invention is done in any vessel, bioreactor or disposable unit providing the appropriate conditions for the particular host cell.

[0134] The herein described CMV particles are purified using ultracentrifugation based classical glycerol-tartrate and sucrose gradients or modern chromatography based techniques, preferably affinity (IMAC) and ion exchange chromatography using large porous matrices such as membrane adsorbers and monoliths.

[0135] The virus-like particles of the invention are used as therapeutics and/or as prophylactic vaccines. Furthermore they are used as antigens in diagnostic tools and as antigens for antibody generation.

[0136] For both types of vaccines, either prophylactic or therapeutic, the antigen specific CD8+, cytotoxic T cell response as well as the antigen specific CD4+, T helper cell response is most important. Therefore the protein compositions of the VLPs are adapted to induce T-cell by expressing, e.g., pUL83, a known T-cell stimulator. In order to further address the different requirements of preventive vaccines, the present invention contains combinations of VLPs, soluble protein complex and single proteins. The compositions of the VLPs are adapted to contain immunogenic glycoproteins (gpUL75, gpUL55) and proteins necessary for formation of distinct complexes (gpUL115, gpUL128, gpUL130, gpUL131A). These combinations comprise the combination of soluble pentameric complex [gpUL75 (gH), gpUL115 (gL), gpUL128, gpUL130, gpUL131A] and virus-like particles, combination of one or more single soluble protein (such as pUL83, gpUL55) and the virus-like particles, and combination of the virus-like particles, the pentameric complex and a single soluble protein. The combinations are aimed at enhancing the immune response in general and induce generation of neutralizing antibodies and a long-lasting response. For the induction of neutralizing antibodies the glycoproteins gpUL75 (gH), gpUL115 (gL) and gpUL55 (gB) are essential targets and are therefore expressed on the surface of the CMV-VLPs, preferably of the HCMV-VLPs.

[0137] A further aspect of this invention is the use of CMV-VLP and soluble pentameric complex (gpUL75 (gH), gpUL115 (gL), gpUL128, gpUL130, gpUL131A) in a prime-boost regimen, preferably priming with the VLPs and boosting with the pentameric complex. Priming with the pentameric complex and VLP boost is a suitable vaccination scheme. The combination of VLP and soluble protein and/or VLP and DNA in such a prime-boost scenario is another aspect of this invention.

[0138] In a further aspect the invention relates to a vaccine comprising a recombinant virus-like particle as described, in particular to such a vaccine further comprising the pentameric complex consisting of gpUL75, gpUL115, gpUL128, gpUL130 and gpUL131A, and/or soluble CMV protein selected from the group consisting of gpUL75, gpUL115, gpUL55, gpUL74, gpUL100, and gpUL73; or gpUL128, gpUL130, and gpUL131A; or pUL83, IE-1, UL99, UL91, and pp150. Such a vaccine may further comprise an adjuvant selected from the group consisting of aluminium hydroxide, alum, AS01, AS02, AS03, ASO4, MF59, MPL, QS21, ISCOMs, IC31, unmethylated CpG, ADVAX, RNA containing formulations and Freund's reagent, but also DNA of the invention as defined above.

[0139] To reduce the chance of congenital disease a prophylactic vaccine to prevent the first CMV infection of the mother is desirable, whereas an effective therapy is needed in the case a mother is diagnosed with an active CMV infection.

[0140] The pharmaceutical compositions of the VLPs of this invention are used in a method of prophylaxis. A method for vaccinating a human uses a pharmaceutical composition of the present invention comprising VLPs in the range of 10 μg to 10 mg/dose. An average human of 70 kg is assumed to receive at least a single vaccination. Preferably a dosage regimen comprising 3 doses applied at 0, 8 and 24 weeks, optionally followed by a second vaccination round 12-24 months after the last immunization is chosen. Preferred routes of administration are subcutaneous (sc) and intramuscular (im) administration, but intradermal and intranasal are also suitable administrations.

[0141] The pharmaceutical compositions of the VLPs of this invention are likewise used in a method of therapeutic treatment. A method for vaccinating a human for treatment purposes uses a pharmaceutical composition of the present invention comprising VLPs in the range of 10 μg to 10 mg/dose. An average human of 70 kg is assumed to receive at least a single vaccination. Preferably a dosage regimen comprising 3 doses applied at 0, 8 and 24 weeks, optionally followed by a second vaccination round 12-24 months after the last immunization is chosen. The pharmaceutical composition of the present invention comprises VLPs in the range of 5 μg to 10 mg/dose for women and half this dose for children.

[0142] In a further aspect of treatment, the pharmaceutical compositions comprise VLP, pentameric complex, and/or soluble protein as separate or combined pharmaceutical compositions for a prime-boost regimen. Each component is used in the range of 10 μg to 10 mg/dose, respectively. The pharmaceutical composition of the combination of VLP and pentameric complex and/or soluble protein is in the range of 10 μg to 10 mg/dose of each component. Different ratios of the components are likewise possible. An average human of 70 kg is assumed to receive at least one single vaccination. Preferably a dosage regimen comprising 3 doses applied at 0, 8 and 24 weeks, optionally followed by a second vaccination round 12-24 months after the last immunization is chosen. Preferred routes of administration are subcutaneous (sc) and intramuscular (im) administration, but intradermal and intranasal are also suitable administrations.

[0143] The method of treatment of the invention is particularly important for solid organ, bone marrow and/or stem cell transplant recipients. For these patients a fast and effective CD8+ and CD4+ T-cell response is crucial. To address this topic the pharmaceutical composition of the present invention is in the range of 10 μg to 10 mg/dose. An average human of 70 kg is assumed to receive at least once a vaccination. Preferably a dosage regimen comprising 3 doses applied at 0, 2 and 4 weeks before transplantation, optionally followed by a second vaccination round 1, 4, 8 weeks after the transplantation is chosen.

[0144] Vaccines according to the invention comprise the recombinant virus-like particle, the pentameric complex and/or the soluble protein in aqueous solution, and optionally further viscosity-regulating compounds, stabilizing compounds and/or an adjuvant increasing the immunogenicity, as it is known in the state of the art.

### EXAMPLES

### Example 1

### Construction of Recombinant Expression Vectors RBT136-7 and RBT136-9

[0145] For the generation of expression constructs for the BEVS system the vector backbone pRBT136, containing elements for propagation in E. coli and yeast (e.g. Saccharomyces cerevisae) and for protein expression in insect cells, is used. For the various VLP variants different genes were chosen for providing the capsid, the tegument and surface proteins.

[0146] The genes are generated by gene synthesis with a specific optimization for Spodoptera frugiperda and chosen out of the following groups of the cytomegalovirus genes: first from the capsid compartment, e.g. pUL86, pUL85, pUL46, pUL48, pUL50, and pUL80.5 (UL80A); second from the tegument part, e.g. pUL83, pUL25, ppUL32, and pUL99, and third from the surface part, e.g. gpUL55 (gB), gpUL75 (gH), gpUL115 (gL), gpUL74 (gO), gpUL100 (gM), gpUL73 (gN), gpUL128, gpUL130, and gpUL131A. In order to build the HCMV capsid multiple gene combinations of pUL86, pUL85, pUL46, and pUL80a, optionally in combination with the functional genes pUL48a and pUL50, were used. The tegument chosen is pUL83 whereas the surface was prepared from gpUL55 (gB), gpUL75 (gH), gpUL115 (gL), gpUL74 (gO), gpUL128, gpUL130, and gpUL131A.

[0147] The parallel assembly of pUL86-pUL85-pUL50-pUL48-pUL46-pUL83-pUL80.5-gpUL74 (gO) into one expression vector as well as the assembly of gpUL75 (gH)-gpUL115 (gL)-gpUL128-gpUL130-gpUL131A in a second expression vector was conducted by homologous recombination of PCR products representing various expression cassettes of the type promoter-gene-terminator. The vector backbone pRBT136 contains an origin of replication for E. coli and yeast, the polh and p10 promoters for expression in insect cells, the terminator SV40 and HSVtk, several resistance markers (ampicillin, gentamycin), transposon sites (Tn) and a multiple cloning site (MCS). The expression cassette containing promoter—UL86—terminator was PCR amplified at the 5′ site with the primer RBT155 (TGATTTGATAATAATTCTTATTTAAC, SEQ ID NO:63) and at the 3′ site with a 35-40 nt overhang (GGCTAGCTTTGTTTAACTTTAAGAAGGAGATACATCTAGA, SEQ ID NO:64). For homologous recombination with the expression cassette containing promoter—UL85—terminator, this part was PCR amplified at the N-terminal end with the complementary sequence of the 35-40 nt overhang at the C-terminal end of the previous PCR product. The homologous recombination took place in yeast (Saccharomyces cerevisiae): An overnight culture was centrifuged at 500×g at 25° C. for 5 min, the supernatant was aspirated and the pellet washed with water and with Tris-EDTA-LiOAc buffer. The vector, linearized with EcoRI and HindIII (1 μl), salmon sperm DNA (8 μl) and the PCR products (1-4 μl) representing the expression cassettes were added to 50 μl washed yeast, incubated for 30 min at 30° C., followed by a heat shock at 42° C., and plated on a respective amino acid drop out agar plate without uracil, and incubated for 3 days. The resulting vector was isolated from the yeast cell by freeze (liquid nitrogen, 2 min)—thaw (95° C., 1 min)—lysis. After addition of the same volume chloroform the vector was precipitated with the double volume of ethanol. The precipitated vector (5 μl) was added to 50 μl competent XL-1 blue (Stratagene) followed by a transformation according to the manufacturer's protocol: Incubation on ice for 30 min, followed by a heat shock at 42° C. for 45 sec, a 2 min cold shock at 4° C., addition of 200 μl 2YT medium, and a 1 h incubation at 220 rpm at 37° C. The culture was then plated on 2YT agar plates containing 100 μg ampicillin and 100 μg gentamycin. The grown clones were verified by PCR screening, analytical digests and sequencing to prove the presence of all assembled genes.

[0148] The genes UL83 and UL80.5 were assembled into the vectors pRBT4 and combined by cre-lox recombination with pRBT136 containing pUL86-pUL85-pUL50-pUL48-pUL46-gpUL74 (gO). 1 μl cre-recombinase was added to 500 ng of pRBT5 and pRBT136 in a 10 μl total volume and incubated for 30 min at 37° C. After a 10 min heat inactivation at 70° C. a transformation in XL-1 blue competent cells was performed as described above. The clones were verified by PCR screening, analytical digest and sequencing. The sequenced plasmids were used for the generation of the corresponding baculovirus genome (bacmid). The genes of interest were transferred by site-specific homologous recombination via Tn7 directed transposition into competent DH10MB cells. 10 ng sequenced plasmid was added to 100 μl competent DH10MB cells and incubated for 30 min at 4° C. After a heat shock at 42° C. for 45 sec, a 2 min cold shock at 4° C., addition of 400 μl 2YT medium and a 4 h incubation at 37° C. at 220 rpm, a 1:10 dilution was plated on appropriate 2YT agar plates containing the antibiotics according to the resistance markers and IPTG/X-gal for blue-white screening. Correct clones were selected, expanded and DNA isolated using the Birnboim & Doly method (Nucleic Adds Res. 1979; 7(6):1513-23). Four correct bacmid clones (1 μg of each) were selected for initial transfection of insect cells (Sf9, 1×10⁶ cells/6-well) using the reagent Fugene (3 μl, Roche, Switzerland) to generate the recombinant seed virus (V₀). Two consecutive amplifications of this virus were performed using a multiplicity of infection (MOI) of 0.05 pfu/cell in a 200 ml culture for the generation of master seed virus (V₁) and working seed virus (V₂). The infective titer of the working seed virus was determined by a classical plaque assay. Virus dilutions (10⁵ to 10⁸ in a volume of 1 ml) were added to 1×10⁶ cells/6-well Sf9 cell culture, and incubated for 1 h at 27° C. After aspiration of the virus, the cells were overlayed with 4% agarose in Sf900-1.3 medium, followed by an incubation at 27° C. in a humidified chamber. The infective titer of the different constructs were in the range of 1-5×10⁷ pfu/cell.

[0149] The production parameters such as cell line, cell count at infection (CCI), amount of recombinant virus inoculum (multiplicity of infection, MOD and time of harvest (TOH) were determined in 50 ml bioreactors (Cultiflask, Sartorius Stedim) by infection of a 20 ml insect cell culture. A matrix of different CCIs (0.5; 1, 2×10⁶ cells/ml), MOIs (0.1, 0.4, 1, 2, 4) and time of harvest (TOH) was conducted for 7 days to determine the best production parameters in respect of yield (Ries, C., John C., Eibl R. (2011), A new scale down approach for the rapid development of Sf21/BEVS based processes—a case study. In Eibl R., Eibl D. (Editors): Single-use technology in Biopharmaceutical Manufacture, 207-213, John Wiley & Sons, Hoboken, N.J.). The production was controlled by daily sampling, determining cell count and viability. The samples were analysed by immunoblotting and ELISA. The best production parameters in respect of yield evaluated as highest intensity (Dot blot) and highest OD (ELISA) were reached 3 days post infection (p.i.) with a cell count of infection (CCI) of 2×10⁶ cells/mL and a MOI of 0.2 of each virus used for co-infection.

[0150] For the immunoblotting 100 μl of the cell culture samples were subjected to a nitrocellulose membrane (BioRAD) by filtration using a dot-blot chamber (BioRAD). After blocking unspecific binding sites for 30 min with 5% non-fat dry-milk TrisCl-Tween20 (0.1%) solution, the membrane was incubated over night at 4° C. with antibodies against the tegument protein UL83. Protein detection was performed with NBT/BCIP (ThermoFisher) solution after incubation with an alkaline-phosphatase coupled secondary anti-mouse antibody (Cell signaling).

[0151] For the ELISA assay all collected cell culture samples were diluted 1:10 in 100 μl/well coating buffer (0.1 M Na₂HPO₄, pH 9) in a 96-well pre-absorbed ELISA plate (Nunc) and incubated over night at 4° C. Afterwards the plate was washed 3× with 195 μl/well wash buffer (1×PBS, 0.05% Tween 20) followed by a 1 h blocking at room temperature with 195 μl/well 3% BSA in 1×PBS solution. After 3 washing steps the specific antibodies in a concentration of 1 μg/ml in 3% BSA, 1×PBS, 0.05% Tween 20, pH 7 were added (100 μl/well) and incubated for 1 h at room temperature. A mouse-anti-gH (Santa Cruz) antibody was used for the detection of the surface protein gH whereas the tegument protein UL83 was verified with a mouse-anti-UL83 antibody (Virusys). After 3 washing steps a 1 h incubation with the appropriate secondary antibody (anti-mouse-IgG-HRP, 1:1000 dilution in 3% BSA, 1×PBS, 0.05% Tween20, pH 7) was conducted. The binding of the specific antibodies (UL83, gH) to the VLP was detected using 100 μl/well TMP substrate reagent (BD Biosciences, San Diego, USA; according to manufacturer's protocol), thereafter the reaction was stopped after 3-15 min with 100 μl 1 M HCl, followed by OD measurement at 450 nm in a microplate reader.

[0152] The following expression vectors (pRBT136-x) for generation of CMV-VLP variants were processed as described in Example 1.

[0153] Abbreviations: c: consensus sequence; H: His-tag; SH: Streptavidin-His-tag; V: VR1814, pcI: precission protease, pcII: precission and TEV protease, DT: dimerization tool. For the description of the genes in Table 1 the shorter HCMV nomenclature (gB, gH, gL, gO as well as “UL” without prefix and UL48 without suffix “A”) is used.

TABLE 1

| Vector | | |
|---|---|---|
| variant | | Variant with |
| (pRBT | | dimerisation tool (DT) |
| 136-x) | | at gH and capsid |
| SEQ ID | Contained genes | protein (gag or UL86) |
| 1 | UL86, Towne | |
| 2 | UL86-UL83-UL80.5, Towne | |
| 3 | UL86-UL85-UL83-UL80.5, Towne | |
| 4 | UL86-UL85-UL50-UL48A-UL46, Towne | |
| 5 | UL86-UL85-UL50-UL48A-UL46-UL83-UL80.5, Towne | |
| 6 | UL86-UL85-UL50-UL48A-UL46-UL74, Towne | |
| 7 | UL86-UL85-UL50-UL48A-UL46-UL74-UL83-UL80.5, | |
| | Towne | |
| 8 | gB, Towne | |
| 9 | gH-gL-UL128-UL130-UL131A, Towne | gH (DT; Towne) |
| 10 | gH-gL-UL128(c)-UL130-UL131A, Towne | gH (DT; Towne) |
| 11 | gH-gL(H)-UL128-UL130-UL131A, Towne | |
| 12 | gH-gL(H)-UL128(c)-UL130-UL131A, Towne | gH (DT; Towne) |
| 13 | gH-gL(SH)-UL128-UL130-UL131A, Towne | |
| 14 | gH-gL(SH)-UL128(c)-UL130-UL131A, Towne | gH (DT; Towne) |
| 15 | gH-gL-UL128(Towne)-UL130(V)-UL131A(V) | |
| 16 | gH-gL-UL128(c)-UL130(V)-UL131A(V) | |
| 17 | gL-UL128-UL130-UL131A-gB, Towne | |
| 18 | gL-UL128-UL130-UL131A-gB-gH, Towne | gH (DT; Towne) |
| 19 | gL-UL128-UL130-UL131A-gB-gH-UL83, Towne | |
| 20 | Gag | |
| 21 | Gag-dimerization tool (DT) | |
| 22 | Gag-UL83 | |
| 23 | gH(DT)-gL-UL128-UL130-UL131A, Towne | |
| 24 | gH (DT)-gL-UL128(c)-UL130-UL131A, Towne | |
| 25 | gH(DT)-gL(SH)-UL128-UL130-UL131A, Towne | |
| 26 | gH (DT)-gL(SH)-UL128(c)-UL130-UL131A, Towne | |
| 27 | gL-UL128-UL130-UL131A-gB-gH(DT), Towne | |
| 28 | gL-UL128-UL130-UL131A-gB-gH-gag, Towne | gH (DT; Towne), gag |
| | | (DT) |
| 29 | gL-UL128(c)-UL130-UL131A-gB(T)-gH (T)-gag | gH (DT), gag (DT) |
| 30 | gL-UL128(c)-UL130(V)-UL131A(V)-gB(T)-gH(T)-gag | gH (DT), gag (DT) |
| 31 | gL-UL128-UL130-UL131A-gB-gH-gag-UL83, Towne | |
| 32 | gL-UL128(c)-UL130-UL131A-gB-gH-gag-UL83, Towne | |
| 33 | gL-UL128(c)-UL130(V)-UL131A(V)-gB(T)-gH(T)-gag- | |
| | UL83(T) | |
| 34 | gag-UL83, Towne | gag (DT) |
| 35 | UL86-UL85-UL50-UL48A-UL46-UL83-UL80.5, Towne | UL86 (DT) |
| 36 | UL128-UL130-UL131A-gL-gB-gH-UL86-UL85, Towne | gH (DT), UL86 (DT) |
| 37 | UL128 (c)-UL130-UL131A-gL-gB-gH-UL86-UL85, | gH (DT), UL86 (DT) |
| | Towne | |
| 38 | UL128 (c)-UL130(V)-UL131A(V)-gL-gB-gH-UL86- | gH (DT), UL86 (DT) |
| | UL85, Towne | |
| 39 | UL128-UL130-UL131A-gL-gB-gH-UL86-UL80.5, | gH (DT), UL86 (DT) |
| | Towne | |
| 40 | UL128(c)-UL130-UL131A-gL-gB-gH-UL86-UL80.5, | gH (DT), UL86 (DT) |
| | Towne | |
| 41 | UL128 (c)-UL130(V)-UL131A(V)-gL-gB-gH-UL86- | gH (DT), UL86 (DT) |
| | UL80.5, Towne | |
| 42 | UL128-UL130-UL131A-gL-gB-gH-UL86-UL80.5-UL83- | gH (DT), UL86 (DT) |
| | UL85, Towne | |
| 43 | UL128 (c)-UL130-UL131A-gL-gB-gH-UL86-UL80.5- | gH (DT), UL86 (DT) |
| | UL83-UL85, Towne | |
| 44 | UL128(c)-UL130(V)-UL131A(V)-gL-gB-gH-UL86- | gH (DT), UL86 (DT) |
| | UL80.5-UL83-UL85, Towne | |
| 45 | UL128-UL130-UL131A-gL-gB-gH-UL80.5-UL83-UL86- | gH (DT), UL86 (DT) |
| | UL85-UL50-UL48A-UL46, Towne | |
| 46 | UL128(c)-UL130-UL131A-gL-gB-gH-UL83-UL80.5- | gH (DT), UL86 (DT) |
| | UL86-UL85-UL50-UL48A-UL46, Towne | |
| 47 | UL128(c)-UL130(V)-UL131A(V)-gL-gB-gH-UL83- | gH (DT), UL86 (DT) |
| | UL80.5-UL86-UL85-UL50-UL48A-UL46, Towne | |
| 48 | UL74-UL86-UL83-UL80.5-UL85, Towne | UL86 (DT) |
| 49 | UL128-UL130-UL131A-gL-gB-gH-UL86-UL85-UL83- | gH (DT), UL86 (DT) |
| | UL80.5-UL74, Towne | |
| 50 | UL128(c)-UL130-UL131A-gL-gB-gH-UL86-UL85- | gH (DT), UL86 (DT) |
| | UL83-UL80.5-UL74, Towne | |
| 51 | UL128(c)-UL130(V)-UL131A(V)-gL-gB-gH-UL86- | gH (DT), UL86 (DT) |
| | UL85-UL83-UL80.5-UL74, Towne | |
| 52 | UL74-UL86-UL85-UL50-UL48A-UL46-UL83-UL80.5, | UL86 (DT) |
| | Towne | |
| 53 | UL128-UL130-UL131A-gL-gB-gH-UL86-UL85-UL83- | gH (DT), UL86 (DT) |
| | UL80.5-UL74-UL50-UL48A-UL46, Towne | |
| 54 | UL128(c)-UL130-UL131A-gL-gB-gH-UL86-UL85- | gH (DT), UL86 (DT) |
| | UL83-UL80.5-UL74-UL50-UL48A-UL46, Towne | |
| 55 | UL128(c)-UL130(V)-UL131A(V)-gL-gB-gH-UL86-UL85- | gH (DT), UL86 (DT) |
| | UL83-UL80.5-UL74-UL50-UL48A-UL46, Towne | |
| 56 | UL128-UL130-UL131A-gL-gB-gH-UL86-UL85-UL83-- | gH (DT), UL86 (DT) |
| | UL50-UL48A-UL46, Towne | |
| 57 | UL128(c)-UL130-UL131A-gL-gB-gH-UL86-UL85-UL83-- | gH (DT), UL86 (DT) |
| | UL50-UL48A-UL46, Towne | |
| 58 | UL128(c)-UL130(V)-UL131A(V)-gL-gB-gH-UL86- | gH (DT), UL86 (DT) |
| | UL85-UL83-UL50-UL48A-UL46, Towne | |
| 59 | gH (without membrane anchor, His)-gL-UL128-UL130- | |
| | UL131A, Towne | |
| 60 | gH (without membrane anchor, SH)-gL-UL128-UL130- | |
| | UL131A, Towne | |
| 61 | gH (without membrane anchor, H-pcI)-gL-UL128- | |
| | UL130-UL131A, Towne | |
| 62 | gH (without membrane anchor, H-pcII)-gL-UL128- | |
| | UL130-UL131A, Towne | |
| 67 | UL86-UL85 | UL86 (DT) |
| 68 | UL73-UL86-UL80.5-UL83-UL85, Towne | UL86 (DT) |
| 69 | UL86-UL80.5-UL83-UL85-UL73, Towne | UL86 (DT) |
| 70 | UL100-UL86-UL80.5-UL83-UL85, Towne | UL86 (DT) |
| 71 | UL86-UL80.5-UL83-UL85-UL100, Towne | UL86 (DT) |
| 72 | UL100-UL73, Towne | |
| 73 | UL100-UL73-UL86-UL80.5-UL83-UL85-, Towne | UL86 (DT) |
| 74 | UL86-UL83-UL80.5-UL85-UL100-UL73, Towne | UL86 (DT) |
| 75 | UL74-UL86-UL83-UL80.5-UL85-UL73, Towne | UL86 (DT) |
| 76 | UL74-UL86-UL83-UL80.5-UL85-UL100, Towne | UL86 (DT) |
| 77 | UL74-UL86-UL83-UL80.5-UL85-UL100-UL73, Towne | UL86 (DT) |
| 78 | UL86-UL85-UL48A | UL86 (DT) |
| 79 | UL86-UL85-UL48A-UL100 | UL86 (DT) |
| 80 | UL86-UL85-UL48A-UL83 | UL86 (DT) |
| 81 | UL86-UL85-UL48A-UL83-UL100 | UL86 (DT) |
| 82 | UL86-UL85-UL48A-UL83-UL100-UL73 | UL86 (DT) |
| 83 | UL74-UL86-UL85-UL48A-UL83-UL100 | UL86 (DT) |
| 84 | UL74-UL86-UL85-UL48A-UL83-UL100-UL73 | UL86 (DT) |
| 85 | UL128-UL130-UL131A-gL-gB-gH-UL86-UL85-UL83- | UL86 (DT) |
| | UL80.5-UL50-UL48A-UL46, Towne | |
| 86 | UL128(c)-UL130-UL131A-gL-gB-gH-UL86-UL85-UL83- | UL86 (DT) |
| | UL80.5-UL50-UL48A-UL46, Towne | |
| 87 | UL128(c)-UL130(V)-UL131A(V)-gL-gB-gH-UL86-UL85- | UL86 (DT) |
| | UL83-UL80.5-UL50-UL48A-UL46, Towne | |
| 88 | MoMULV gag | DT |
| 89 | MoMULVgag-UL83 | DT |
| 90 | UL74-UL86-UL85-UL48A-UL83-UL-100gL-UL128- | UL86 (DT), gH (DT) |
| | UL130-UL131A-gB-gH, Towne | |
| 91 | UL86-UL85-UL48A-UL83-UL100-gL-UL128(c)- | UL86 (DT), gH (DT) |
| | UL130(V)-UL131A(V)-gB-gH, Towne | |

### Example 2

### Expression Vectors pRBT136CMV-1; pRBT136CMV-8 and pRBT136CMV-20

[0154] To obtain the expression vectors pRBT136CMV-1; pRBT136CMV-8 and pRBT136CMV-20 each gene of interest, namely UL86, UL55 (gB), and gag, was subcloned from a pBluescript vector by BamHI (5′) and HindIII (3′) digestion and ligation into the backbone pRBT136 cut with the same enzymes. The ligation was conducted with 2 μg cut pRBT136, 10 μg fragment and 1 μl T4-ligase (NEB) in a total volume of 20 μl, followed by a transformation in competent XL-1 blue cells as described in Example 1.

### Example 3

### Expression Construct for Capsid Variant pRBTCMV-2

[0155] To obtain the expression construct for capsid variant pRBTCMV-2 for the generation of CMV-VLP an expression cassette containing UL86 and another with UL83 were assembled in parallel as described in Example 1. The integration of the UL80.5 expression cassette was done by ligation of a PCR product using as forward primer RBT204 (TGCTGCCCACCGCTGAGCAATAACTATCATAACCCCCGGAATATTAATA GATCATGG, SEQ ID NO:65) and a reverse primer RBT189 (GTAGCGTCGTAAGCTA ATACG, SEQ ID NO:66) by ligation as described in Example 2.

### Example 4

### Expression Construct for Capsid Variant pRBTCMV-3

[0156] To generate the expression construct for capsid variant pRBTCMV-3, the plasmid of variant pRBTCMV-2 was cut with the restriction enzyme AvrII. The expression cassette with the gene UL85 was amplified with the primers pRBT526 (5′) and pRBT189 (3′) and introduced in the plasmid pRBTCMV-2 by homologous recombination as described in Example 1.

### Example 5

### Expression, Purification and Characterization of the CMV-VLP Variant 5

[0157] According to the protein expression parameters defined after systematic optimization (Example 1) the virus-like particles (VLP) comprising UL86-UL85-UL50-UL48-UL46-UL83-UL80.5-UL74-gH-gL-UL128-UL130-UL131A are produced in disposable 1 L shake flasks (culture volume 300 mL) in fall army worm Spodoptera frugiperda cells (Sf9) by co-infection of 2 baculoviruses (SEQ ID NO:5 and SEQ ID NO:12) containing each multiple genes. The production parameters were as follows: Initial cell count at infection (CCI) of 2×10⁶ cells/ml, a multiplicity of infection (MOI) of 0.4 pfu/ml, for each virus 0.2 pfu/ml, incubation at 27° C. at 100 rpm. Harvest took place at day 3 post infection (p.i.) at a viability around 80%. The production was controlled by daily sampling, determining cell count and viability. The VLP containing supernatant was concentrated 3× using tangential-flow-filtration with a Hydrosart Sartocon Slice200 cassette with a molecular weight cut off (MWCO) of 100 kDa and a filter area of 0.02 m² (Sartorius Stedim) at a flow rate of 80 ml/min and a transmembrane pressure between 1-1.5 bar. The retentate was subjected to purification by a 2-step glycerol-tartrate gradient ultracentrifugation. In a first step 25 ml retentate were overlayed onto a 6 mL 30% sucrose cushion (w/v in 50 mM Tris, 100 mM NaCl, pH 7.4) and pelleted for 1.5 h at 16000 rpm and 16° C. using a SW28 rotor. The pellet was resuspended in 0.5 ml TN-buffer (50 mM Tris, 100 mM NaCl, pH 7.4). A glycerol-tartrate gradient (30% glycerol mixed with 15-35% tartrate, 12 ml volume) was prepared, overlayed with the 0.5 ml pre-purified material and centrifuged for 16 h at 24000 rpm and 16° C. using a SW41 rotor. The gradient was fractionated from top in 0.9 ml fractions and the purified VLPs were analysed by biochemical methods. 150 μl of different gradient fractions were loaded onto a 4-12% Bis-Tris NuPAGE gel (Invitrogen) according to the manufacturer's protocol, run for 15 min at 150 V and for 45 min at 180 V using MOPS running buffer. The gels were stained over night with SimplyBlue SafeStain reagent (Invitrogen) and destained with water.

[0158] For immunoblotting the proteins were transferred onto a nitrocellulose membrane (BioRAD) at 19 V for 1 h using a semi-dry apparatus (BioRAD). After blocking unspecific binding sites for 30 min with 5% non-fat dry-milk TrisHCl-Tween20 (0.1%) solution, the membrane was incubated over night at 4° C. with antibodies against the specific proteins such as the tegument protein pUL83. Protein detection was performed with NBT/BCIP (ThermoFisher) solution after incubation with an alkaline-phosphatase coupled secondary anti-mouse antibody (Cell Signaling).

[0159] Total protein is determined via a Bradford assay adapted to a 96-well plate format (BCA, Pierce). 20 μl of unknown or standard sample was diluted in 180 μl of buffer. Serial 2-fold dilutions are made to the standard in triplicate (pure bovine serum albumin) or unknown samples. 100 μl of 2× stock Bradford reagent (Pierce) was added per well. The plate is then mixed and absorbance was measured at 595 nm in a microtiter plate reader. The CMV-VLPs contained in the different fractions obtained by fractionating the glycerol-tartrate gradient are further analysed by investigating the binding of a specific antibody against the tegument UL83 (mouse-anti-UL83, Virusys) and surface protein gH (mouse-anti-gH, Santa Cruz). Therefore the different gradient fractions were 1:10 diluted in 100 μl/well coating buffer (0.1 M Na₂HPO₄, pH 9) in a 96-well pre-absorbed ELISA plate and incubated over night at 4° C. Afterwards the plate was washed 3× with 195 μl/well wash buffer (1×PBS, 0.05% Tween 20) followed by a 1 h blocking at room temperature with 195 μl/well 3% BSA in 1×PBS solution. After 3 washing steps the specific antibody, the anti-surface antibody (anti-gH,) as well as the anti-tegument antibody (anti-UL83) in a concentration of 1 μg/ml in 3% BSA, 1×PBS, 0.05% Tween 20, pH 7 was added (100 μl/well) and incubated for 1 h at room temperature followed by further 3 wash steps. For detection a 1 h incubation with the appropriate secondary antibody (anti-mouse-IgG-HRP, 1:1000 dilution in 3% BSA, 1×PBS, 0.05% Tween20, pH 7) was conducted. The binding of the specific antibody to the VLP was detected using 100 μl/well TMP substrate reagent (BD Biosciences, San Diego, USA; according to manufacturer's protocol), wherefore the reaction is stopped after 3-15 min with 100 μl 1 M HCl, followed by OD measurement at 450 nm in a microplate reader.

[0160] The following Table 2 is an overview of the CMV-VLP variants which were expressed, purified and characterized as described in Example 5. The genetic constructs described in Table 1 were quality controlled by sequencing before they were used for further manipulation such as generation of the corresponding baculoviruses. The integrity of the generated baculoviruses is quality controlled by PCR based transgene control for presence of each single gene. The most important properties for manufacturing and regulatory approval such as yield and co-localization of the proteins, especially of the immunogenic surface proteins of these CMV VLPs are stated in Table 2.

TABLE 2

| Manufactured | | | | |
|---|---|---|---|---|
| VLPs | capsid | tegument | surface | properties |
| 1 | 86, towne | — | gB-gH-gL-128-130-131, | VLP amount low |
| | | | towne | |
| 2 | 86-85-80.5, | 83, towne | gB-gH-gL-128-130-131, | VLP amount low |
| | towne | | towne | |
| 3 | 86-80.5, towne | 83, towne | gB-gH-gL-128-130-131, | VLP amount low |
| | | | towne | |
| 4 | 86-85-50-48- | 83, towne | gH-gL-128-130-131, towne | good co-localization |
| | 46-80.5, towne | | | |
| 5 | 86-85-50-48- | 83, towne | gO-gH-gL-128-130-131, | good co-localization |
| | 46-80.5, towne | | towne | |
| 6 | 86-85-50-48- | 83, towne | gB-gH-gL-130-131 towne; | good co-localization |
| | 46-80.5, towne | | 128 consensus sequence | |
| 7 | 86-85-50-48- | 83, towne | gO-gB-gH-gL-130-131 | good co-localization |
| | 46-80.5, towne | | towne; 128 consensus | |
| | | | sequence | |
| 8 | 86-85-80.5, | 83, towne | gB-gH-gL-130-131 towne; | good co-localization |
| | towne | | 128 consensus sequence | |
| 9 | 86-85-80.5, | 83, towne | gO-gB-gH-gL-130-131 | good co-localization |
| | towne | | towne; 128 consensus | |
| | | | sequence | |
| 10 | 86-85-80.5, | 83, towne | gB-gH-gL-128 towne, 130- | VLP amount medium |
| | towne | | 131 VR1814 strain | |
| 11 | 86-85-80.5, | 83, towne | gO-gB-gH-gL-128 towne, | good co-localization |
| | towne | | 130-131 VR1814 strain | |
| 12 | 86-85-80.5, | 83, towne | gB-gH-gL-towne, 128 | good co-localization |
| | towne | | consensus, 130-131 | |
| | | | VR1814 strain | |
| 13 | 86-85-80.5, | 83, towne | gO-gB-gH-gL-towne, 128 | good co-localization |
| | towne | | consensus, 130-131 | |
| | | | VR1814 strain | |
| 14 | 86-85-80.5, | 83, towne | gB-gH-gL-128 towne, 130- | good co-localization |
| | towne | | 131 VR1814 strain | |
| 15 | 86-80.5, towne | 83, towne | gO-gB-gH-gL-128 towne, | good co-localization |
| | | | 130-131 VR1814 strain | |
| 16 | 86-80.5, towne | | gB-gH-gL-towne, 128 | good co-localization |
| | | | consensus, 130-131 | |
| | | | VR1814 strain | |
| 17 | 86-80.5, towne | | gO-gB-gH-gL-towne, 128 | good co-localization |
| | | | consensus, 130-131 | |
| | | | VR1814 strain | |
| 18 | gag | — | gH-gL-128-130-131, towne | good co-localization |
| 19 | gag | — | gB-gH-gL-128-130-131, | good co-localization |
| | | | towne | |
| 20 | gag | 83, towne | gB-gH-gL-128-130-131, | Very good co- |
| | | | towne | localization |
| 21 | gag | — | gB-gH-gL-128 towne, 130- | good co-localization |
| | | | 131 VR1814 strain | |
| 22 | gag | — | gO-gB-gH-gL-128 towne, | good co-localization |
| | | | 130-131 VR1814 strain | |
| 23 | gag | — | gB-gH-gL-towne, 128 | good co-localization |
| | | | consensus, 130-131 | |
| | | | VR1814 strain | |
| 24 | gag | — | gO-gB-gH-gL-towne, 128 | good co-localization |
| | | | consensus, 130-131 | |
| | | | VR1814 strain | |

### Example 6

### Expression, Purification and Characterization of the Pentameric CMV Complex

[0161] According to the protein expression parameters defined based on systematic optimization (Example 1 for the VLPs) the pentameric CMV complex comprising gpUL75 (gH-His)-gpUL115 (gL)-gpUL128-gpUL130-gpUL131A is produced in disposable 2 L shake flasks (culture volume 700 ml) in fall army worm Spodoptera frugiperda cells (Sf9) by co-expression from a single baculovirus (SEQ ID NO:59). The production parameters were as follows: Initial cell count at infection (CCI) of 2×10⁶ cells/ml, a multiplicity of infection (MOI) of 0.25 pfu/ml, incubation at 27° C. at 100 rpm. Harvest took place at day 3 post infection (p.i.) at a viability around 80%. The production was controlled by daily sampling, determining cell count and viability. The complex containing supernatant was loaded on 2×5 ml HisTrap columns (GE Healthcare). The complex was purified using a linear gradient from zero to 500 mM imidazole over 50 column volumes (CV, equivalent to 500 ml. The different chromatographic fractions were analysed by biochemical methods. 150 μl of different fractions were precipitated with acetone, resuspended in 30 μl 20 mM Tris, 150 mM NaCl buffer, pH 7.4. For loading onto a 4-12% Bis-Tris NuPAGE gel (Invitrogen) 4× loading dye was added according to the manufacturer's protocol, followed by the electrophoreses for 15 min at 150 V and for 45 min at 180 V using MOPS running buffer. The gels were stained over night with SimplyBlue SafeStain reagent (Invitrogen) and destained with water. For concentration and further purification a 2^{nd} IMAC chromatography was done using a 1 ml HisTrap column by a linear gradient over 50 column volumes from 0-500 mM imidazole. The different fractions were analysed like the 1^{st} IMAC step by Coomassie stained SDS-PAGE and immunoblotting using an anti-His antibody. All complex containing fractions were pooled, concentrated to a final volume of 5 ml using a 50 kDa cut off Amicon filter unit (Millipore) and loaded for a final purification step on a size exclusion column (XK16/69, Superdex200pg) and analysed by SDS-PAGE followed by Coomassie staining and immunoblotting using an anti-His antibody. Total protein is determined via a Bradford assay adapted to a 96-well plate format (BCA, Pierce). 20 μl of unknown or standard sample was diluted in 180 μl of buffer. Serial 2-fold dilutions are made to the standard in triplicate (pure bovine serum albumin) or unknown samples. 100 μl of 2× stock Bradford reagent (Pierce) was added per well. The plate is then mixed and absorbance was measured at 595 nm in a microtiter plate reader. The pentameric CMV complex contained in the different fractions from the chromatographic based purification is further analysed by investigating the binding of a specific antibody against the His-tag added to gpUL75 (gH, mouse-anti-His, AbD Serotec) and the gpUL75 itself (gH, mouse-anti-gH, Santa Cruz). Therefore the different samples were 1:10 diluted in 100 μl/well coating buffer (0.1 M Na₂HPO₄, pH 9) in a 96-well pre-absorbed ELISA plate and incubated over night at 4° C. Afterwards the plate was washed 3× with 195 μl/well wash buffer (1×PBS, 0.05% Tween 20) followed by a 1 h blocking at room temperature with 195 μl/well 3% BSA in 1×PBS solution. After 3 washing steps the specific antibody, the anti-His antibody (anti-His) as well as the anti-gpUL75 (anti-gH) in a concentration of 1 μg/ml in 3% BSA, 1×PBS, 0.05% Tween 20, pH 7 was added (100 μl/well) and incubated for 1 h at room temperature followed by further 3 wash steps. For detection a 1 h incubation with the appropriate secondary antibody (anti-mouse-IgG-HRP, 1:1000 dilution in 3% BSA, 1×PBS, 0.05% Tween20, pH 7) was conducted. The binding of the specific antibody to the pentameric complex was detected using 100 μl/well TMP substrate reagent (BD Biosciences, San Diego, USA; according to manufacturer's protocol), wherefore the reaction is stopped after 3-15 min with 100 μl 1 M HCl, followed by OD measurement at 450 nm in a microplate reader.

### Example 7

### Visual Verification of Generated Assemblies by Electron Microscopy

[0162] To verify the shape of the purified VLPs, electron microscopy was performed. A 10 μl drop of VLP sample was incubated 10 min on a copper covered EM grid, stained with 5 μl phosphor tungsten acid for 5-10 min and de-stained 2 times with water for 1 min. The liquid on the grid was removed with a Whatman paper and the grid was transferred to the JEOL3000 microscope, investigated and pictures of the particles taken.

### Example 8

### Binding Assays by the Use of Sandwich ELISA

[0163] A sandwich ELISA as binding assay was performed to determine the presence and accessibility of the surface proteins of different reVLPs (recombinant VLPs). Therefore a specific surface and/or tegument antibody in a concentration of 1 μg/ml in 3% BSA, 1×PBS, 0.05% Tween 20, pH 7 was added (100 μl/well) in coating buffer (0.1 M Na₂HPO₄, pH 9) in a 96-well pre-absorbed ELISA plate and incubated over night at 4° C. Afterwards the plate was washed 3× with 195 μl/well wash buffer (1×PBS, 0.05% Tween 20) followed by a 1 h blocking at room temperature with 195 μl/well 3% BSA in 1×PBS solution. After 3 washing steps the different VLPs in a 1:10 dilution in 3% BSA, 1×PBS, 0.05% Tween 20, pH 7 were added (100 μl/well) and incubated for 1 h at room temperature. After 3 washing steps the specific antibody, the anti-surface antibody (anti-gH, anti-gB) as well as the anti-tegument antibody (anti-UL83) in a concentration of 1 μg/ml in 3% BSA, 1×PBS, 0.05% Tween 20, pH 7 were added (100 μl/well) and incubated for 1 h at room temperature followed by further 3 wash steps. For detection a 1 h incubation with the appropriate secondary antibody (anti-mouse-IgG-HRP, 1:1000 dilution in 3% BSA, 1×PBS, 0.05% Tween 20, pH 7) was conducted. The binding of the specific antibody to the VLP was detected using 100 μl/well TMP substrate reagent (BD Biosciences, San Diego, USA; according to manufacturer's protocol). The reaction is stopped after 3-15 min with 100 μl 1 M HCl, followed by OD measurement at 450 nm in a microplate reader.

### Example 9

### In Vivo Study in Mice

[0164] For the in vivo study Balb/C mice were used in a prime-boost-boost regimen. Each group contained 8 mice and each mouse received 20 μg protein per injection. For the combination (CMV-reVLP+pentameric complex) a total amount of 40 μg protein was injected. Pre-immune sera were taken after 14 days quarantine of the mice (day 0). The first injection took place 10 days later followed by a booster injection at day 42. The first bleeding was done at day 49. The 2^{nd} booster injection was performed at day 61 followed by a further bleeding at day 70. The final bleeding took place at day 85 followed by the investigation of humoral and cellular immune response.

### Example 10

### Humoral Immune Response Based on Neutralization Assay

[0165] The humoral immune response of the vaccine candidate based on the combination of a CMV-reVLP (vRBT-20) and the pentameric complex (SEQ ID: 59) was investigated by a neutralization assay of the mice sera from example 9 in comparison to sera from CMV negative and CMV positive human blood donors. A BAC (bacterial artificial chromosome)-reconstituted VR1814 strain carrying a GFP molecule for analytical reasons (fix-EGFP) was used for the infection of fibroblasts (MRC-5) and epithelial (ARPE-19) cells to visualize the neutralisation potential of the mouse sera from Example 9. 2×10⁴ cells/well were seeded into a 96 well plate in RPMI medium containing 10% FCS (fetal calf serum).

[0166] A serum pool of the 8 mice was generated and added in 2-fold serial dilutions (1:20 to 1:2560) in 100 μl/well RPMI/FCS medium. The above mentioned fix-EGFP VR1814 virus was added in a tissue culture infectious dose (TCID) of 1000 virus molecules/well which was determined in a pre-assay. The 96 well plates were incubated for 8 days at 37° C. in a CO₂ controlled atmosphere. The determination of green cell was performed in a plate reader with the following parameters: fluorescein-filter [excitation 485/20, emission 530/25), bottom reading mode, time: 0.1 sec, 25× measurements/well after 96 h incubation. The neutralization potency was determined as the dilution of the sera able to show a 50% virus infection inhibition. The following controls were performed: cell control (cells+PBS), virus control (only infected cells) and 5 CMV positive and 5 CMV negative sera from human blood donors.

### Example 11

### Cellular Immune Response Based on EliSpot Data (Multiplex Assay)

[0167] At day 85 of the in vivo study (Example 9) mice were killed and the spleenocytes prepared for the analysis of 10 different cytokines. For the restimulation of the spleenocytes the CMV-reVLP as well as mixes of synthetic peptides were used. The following proteins were verified: HIVgag, pUL83, gpUL75, gpUL115, gpUL55, gpUL128, gpUL130 and gpUL131A. An epitope prediction of each protein was done using several bioinformatics algorithms. For each protein a mix of 4 peptides were generated for the restimulation of the spleenocytes. For HIVgag a commercially available peptide mix of 130 peptides (JPT, Berlin) was used. The cytokines (IFN-gamma, IL-1 beta, IL-2, IL-4, IL-5, IL-6, IL-10, IL-12, gCMSF and TNFalpha) were investigated by a multiplex assay kit from Invitrogen according to the manufacturer's protocol.

### Example 12

### Binding Assays Based on Reaction of Antibodies Present in CMV Positive Blood Serum

[0168] To characterize the different CMV VLPs and soluble complexes as part of a vaccine a double binding assay in a sandwich ELISA format was performed. The presence and accessibility of capsid, tegument and surface proteins of different reVLPs was investigated by a combination of purified monoclonal antibodies and antibodies present in a sera-mix of HCMV positive blood donors. Therefore the anti-CMV monoclonal antibodies such as anti-gH, anti-gB, anti-UL83, anti-UL86, anti-UL85, anti-UL130/UL131A, anti-gag, anti-His were diluted to a final concentration of 1 μg/ml coating buffer (0.1 0.1 M Na₂HPO₄, pH 9) in a 96 well pre-absorbed ELISA plate (100 μl/well) and incubated over night at 4° C. Afterwards the plate was washed 3× with 195 μl/well wash buffer (1×PBS, 0.05% Tween 20) followed by a 1 h blocking at room temperature with 195 μl/well 3% BSA in 1×PBS solution. After 3 washing steps the different CMV VLPs and soluble complex in a 1:10 dilution in 3% BSA, 1×PBS, 0.05% Tween 20, pH 7 were added (100 μl/well) and incubated for 1 h at room temperature. After 3 washing steps a mix of 4 CMV positive human sera was added in a 1:300 dilution in 3% BSA, 1×PBS, 0.05% Tween 20, pH 7 (100 μl/well) and incubated for 1 h at room temperature followed by further 3 wash steps. For detection a 1 h incubation with the appropriate secondary antibody (anti-human-IgG-HRP, 1:1000 dilution in 3% BSA, 1×PBS, 0.05% Tween 20, pH 7) was conducted. The binding of the antibodies present in the human sera to the proteins composing VLPs and soluble complex was detected using 100 μl/well TMP substrate reagent (BD Biosciences, San Diego, USA; according to manufacturer's protocol). The reaction is stopped after 3-15 min with 100 μl 1 M HCl, followed by OD measurement at 450 nm in a microplate reader. This kind of sandwich assay was chosen to verify the integrity of the CMV VLPs and the soluble complex based on the binding on one side to monoclonal antibodies and on the other side to antibodies present in CMV positive sera. The binding to human antibodies in the sera showed the accessibility of proteins of the CMV VLPs and soluble complex.

### Example 13

### Characterization of Different CMV-reVLPs and the Soluble Complex Using Blood Serum from CMV Positive Donors

[0169] The different CMV-reVLP variants were produced as described in Example 5 and subjected to concentration by a sucrose cushion based ultracentrifugation. 25 ml cell culture supernatant was overlayed onto a 6 mL 30% sucrose cushion (w/v in 50 mM Tris, 100 mM NaCl, pH 7.4) and pelleted for 1.5 h at 20′000 rpm and 16° C. using a SW28 rotor. The pellet was resuspended in 0.2-0.4 ml TN-buffer (50 mM Tris, 100 mM NaCl, pH 7.4). 50 μl of the resuspended pellet was loaded onto a 4-12% Bis-Tris NuPAGE gel (Invitrogen) according to the manufacturer's protocol, run for 15 min at 150 V and for 60 min at 180 V using MOPS running buffer. The gels were stained over night with SimplyBlue SafeStain reagent (Invitrogen) and de-stained with water.

[0170] For immunoblotting the proteins were transferred onto a nitrocellulose membrane (BioRAD) at 19 V for 1 h using a semi-dry apparatus (BioRAD). After blocking unspecific binding sites for 30 min with 5% non-fat dry-milk TrisCl-Tween 20 (0.1%) solution, the membrane was incubated over night at 4° C. with either the sera from the mice (pool of the 8 mice per group) or from the human blood donors mentioned in Example 10 in a 1:500 dilution with 5% non-fat-dry-milk TrisCl-Tween20 (0.1%). Protein detection was performed with NBT/BCIP (ThermoFisher) solution after incubation with an alkaline-phosphatase coupled secondary anti-mouse antibody (Cell signaling).

The application's sequence listing, which the Patent Office published only in electronic form, follows.

SEQUENCE LISTING (91 sequences)

SEQ ID NO: 1 - DNA, 7353 bp, Artificial Sequence
  Synthetic construct
ttgttccagtttggaacaagagtccactattaaagaacgtggactccaacgtcaaagggcgaaaaaccgtctatcagggcgatggcccactacgtgaaccatcaccctaatcaagttttttggggtcgaggtgccgtaaagcactaaatcggaaccctaaagggagcccccgatttagagcttgacggggaaagccggcgaacgtggcgagaaaggaagggaagaaagcgaaaggagcgggcgctagggcgctggcaagtgtagcggtcacgctgcgcgtaaccaccacacccgccgcgcttaatgcgccgctacagggcgcgtcgcgccattcgccattcaggctgcgcaactgttgggaagggcgatcggtgcgggcctcttcgctattacgccagctggcgaaagggggatgtgctgcaaggcgattaagttgggtaacgccagggttttcccagtcacgacgttgtaaaacgacggccagtgcatagaccagccgcgtaacctggcaaaatcggttacggttgagtaataaatggatgccctgcgtaagcgggtgtgggcggacaataaagtcttaaactgaacaaaatagatctaaactatgacaataaagtcttaaactagacagaatagttgtaaactgaaatcagtccagttatgctgtgaaaaagcatactggacttttgttatggctaaagcaaactcttcattttctgaagtgcaaattgcccgtcgtattaaagaggggcgtggccaagggcatggtaaagactatattcgcggcgttgtgacaatttaccgaacaactccgcggccgggaagccgatctcggcttgaacgaattgttaggtggcggtacttgggtcgatatcaaagtgcatcacttcttcccgtatgcccaactttgtatagagagccactgcgggatcgtcaccgtaatctgcttgcacgtagatcacataagcaccaagcgcgttggcctcatgcttgaggagattgatgagcgcggtggcaatgccctgcctccggtgctcgccggagactgcgagatcatagatatagatctcactacgcggctgctcaaacttgggcagaacgtaagccgcgagagcgccaacaaccgcttcttggtcgaaggcagcaagcgcgatgaatgtcttactacggagcaagttcccgaggtaatcggagtccggctgatgttgggagtaggtggctacgtctccgaactcacgaccgaaaagatcaagagcagcccgcatggatttgacttggtcagggccgagcctacatgtgcgaatgatgcccatacttgagccacctaactttgttttagggcgactgccctgctgcgtaacatcgttgctgctgcgtaacatcgttgctgctccataacatcaaacatcgacccacggcgtaacgcgcttgctgcttggatgcccgaggcatagactgtacaaaaaaacagtcataacaagccatgaaaaccgccactgcgccgttaccaccgctgcgttcggtcaaggttctggaccagttgcgtgagcgcatacgctacttgcattacagtttacgaaccgaacaggcttatgtcaactgggttcgtgccttcatccgtttccacggtgtgcgtcacccggcaaccttgggcagcagcgaagtcgaggcatttctgtcctggctggcgaacgagcgcaaggtttcggtctccacgcatcgtcaggcattggcggccttgctgttcttctacggcaaggtgctgtgcacggatctgcccttgcttcaggagatcggtagacctcggccgtcgcggcgcttgccggtggtgctgaccccggatgaagtggttcgcatcctcggttttctggaaggcgagcatcgtttgttcgcccaggactctagctatagttctagtggttggctacagctttgtttgtactatcaacaggttgaactgctgatcaacagatcctctacgcggccgcggtaccataacttcgtatagcatacattatacgaagttatctggtttaaacgtacccgtagtggctatggcagggcttgccgccccgacgttggctgcgagccctgggccttcacccgaacttgggggttggggtggggaaaaggaagaaacgcgggcgtattggtcccaatggggtctcggtggggtatcgacagagtgccagccctgggaccgaaccccgcgtttatgaacaaacgacccaacacccgtgcgttttattctgtctttttattgccgtcatagcgcgggttccttccggtattgtctccttccgtgtttcagttagcctcccccatctcccggtaccgcatgctatgcatcagctgctagcaccatggctcgagatcccgggtgatcaagtcttcgtcgagtgattgtaaataaaatgtaatttacagtatagtattttaattaatatacaaatgatttgataataattcttatttaactataatatattgtgttgggttgaattaaaggtccgtatactagtatcgattcgcgacctactccggaatattaatagatcatggagataattaaaatgataaccatctcgcaaataaataagtattttactgttttcgtaacagttttgtaataaaaaaacctataaatattccggattattcataccgtcccaccatcgggcgcggatccgccaccatggaaaactggtccgctctggaactgctgcccaaggtcggaatccctaccgacttcctgacccacgtcaagacctccgctggcgaggaaatgttcgaggctctgaggatctactacggcgacgaccccgagcgttacaacatccacttcgaggctatcttcggcaccttctgcaaccgtctggaatgggtgtacttcctgacttccggcctggctgctgctgctcacgctatcaagttccacgacctgaacaagctgaccaccggcaagatgctgttccacgtgcaagtgccccgtgtggcttccggtgctggcctgcctacctcccgtcagaccaccatcatggtcaccaagtactccgagaagtcccccatcaccatccctttcgagctgtccgctgcttgcctgacttacctgcgtgaaaccttcgagggcaccatcctggacaagatcctgaacgtcgaggctatgcacaccgtgctgcgtgctctgaagaacaccgctgacgctatggaacgtggcctgatccacagcttcctccagaccctgctgaggaaggctcccccctacttcgtggtgcagaccctggtcgagaacgctaccctggctcgtcaggctctgaaccgtatccagcgctccaacatcctgcagtccttcaaggctaagatgctggctaccctgttcctgctgaaccgtacccgtgaccgtgactacgtgctgaagttcctgacccgtctggctgaggctgctaccgactccatcctcgacaaccctactacctacaccacctcctccggtgctaagatctccggtgtcatggtgtccaccgctaacgtgatgcagatcatcatgtccctgctgtcctcccacatcactaaggaaaccgtgtccgctcccgctacctacggcaacttcgtgctgtcccccgagaacgctgtgaccgctatctcctaccactctatcctggctgacttcaactcctacaaggctcacctgacctccggccagccccacctccccaacgactccctgagccaggctggtgctcactccctgacccccctgtccatggacgtgatccgtctgggcgaaaagaccgtgatcatggaaaacctgcgtcgcgtgtacaagaacaccgacaccaaggaccccctggaacgtaacgtggacctgaccttcttcttccccgtgggcctgtacctgcccgaggaccgtggttacaccaccgtcgagtccaaggtcaagctgaacgacaccgtgcgtaacgctctgcccaccaccgcttacctgctgaacagggaccgtgctgtgcaaaagatcgacttcgtggacgctctcaagaccctgtgccaccccgtgctgcacgagcctgctccatgcctgcaggctttcaccgagcgtggtcccccatccgagcccgctatgcagcgtctgctggaatgccgtttccagcaagagcccatgggtggtgctgctcgtcgtatcccccacttctaccgtgtgcgccgcgaggtgccccgtaccgtgaacgagatgaagcaggacttcgtggtcaccgacttctacaaggttggaaacatcaccctgtacaccgagctgcaccctttcttcgacttcacccactgccaagagaactccgagactgtggctctgtgcaccccccgtatcgtgatcggcaacctgcccgacggcctggctcccggtcccttccacgagctgaggacctgggagatcatggaacacatgcgcctgcgtcccccacccgactacgaggaaaccctgcgtctgttcaagaccaccgtgacctcccccaactaccccgagctgtgctacctggtggacgtgctggtgcacggcaacgctgacgctttcctgctgatccgcgctttcatcgctcgttgcatcgtgaacatgttccacacccgtcagctgctggtgttcgctcactcctacgctctggtcaccctgatcgctgagcacctggctgacggtgctctgcccccccagctcctgttccactaccgtaacctggtggctgtgctgcgcctggtcacccgtatctccgctctgcccggcctgaacaacggccagctggctgaggaacccctgtccgcttacgtgaacgctctgcacgaccacaggctgtggccccccttcgtgacccacctccctcgtaacatggaaggtgtccaggtggtggctgatcgtcagcccctgaaccccgctaacatcgaggctcgtcaccacggtgtctccgacgtgccccgtctgggtgctatggacgctgacgagcccctgttcgtggacgactaccgtgctaccgacgacgagtggaccctgcaaaaggtgttctacctgtgcctgatccccgctatgaccaacaaccgtgcttgcggcctgggcctgaacctcaagactctgctggtggacctgttctaccgtcccgccttcctgctcatgcccgctgctaccgctgtgtccacctccggcaccacctccaaggaatccacctctggtgtcacccccgaggactccgtggctgctcagcgtcaggctgtgggcgagatgctgaccgagctggtcgaggacgtggccaccgacgctcacacccctctgctgcaggcttgccgcgagctgttcctggctgtgcagttcgtgggcgagcacgtgaaggtgctggaagtgcgtgctcccctggaccacgctcagaggcagggactgcccgacttcatctcccgtcagcatgtgctgtacaacggttgctgcgtcgtgaccgctcctaagaccctgatcgagtactccctgcccgtgcccttccaccgtttctactccaaccccaccatctgcgctgctctgtccgacgacatcaagcgttacgtgaccgagttcccccactaccatagacacgatggtggtttccccctgcccaccgctttcgctcacgagtaccacaactggctgcgtagccccttctcccgttactccgctacctgccccaacgtgctgcactccgtgatgaccctggctgctatgctgtacaagatctcccccgtgtccctggtgctgcagaccaaggctcacatccaccccggtttcgctctgaccgctgtgcgtaccgacaccttcgaggtggacatgctgctgtactccggcaagtcctgcacctccgtcatcatcaacaaccccatcgtgaccaaggaagagagggacatctccaccacctaccacgtgacccagaacatcaacaccgtggacatgggcctgggttacacctccaacacttgcgtggcctacgtgaaccgcgtccgcaccgacatgggtgtccgtgtgcaggacctgttccgtgtgttccccatgaacgtgtaccgccacgatgaggtggaccgttggatcaggcacgctgctggcgtcgagcgtccccagctgctggacaccgagactatctccatgctgaccttcggttccatgtccgagcgcaacgctgctgctaccgtgcacggccagaaggctgtctgcgagctgatcctgacccctgtgactatggacgtgaactacttcaagatcaccaacaaccctcgtggtcgtgcttcctgcatgctgggcgtggacccctacgacaccgaggctgccaccaaggctatctacgaccaccgcgaggctgacgctcagaccttcgctgctacccacaacccatgggcttcccaggctggttgcctgtccgacgtcctgtacaacacccgtcaccgcgagcgtctgggctacaactccaagttctactccccctgcgctcagtacttcaacaccgaggaaatcatcgctgccaacaagaccctcttcaagaccatcgacgagtacctgctgcgcgctaaggactgcatccgtggcgacaccgacactcagtacgtgtgcgtcgagggaaccgagcagctgatcgagaacccttgccgtctgacccaagaggctctgcccatcctgtccaccaccaccctggctctgatggaaactaagctgaagggtggcgctggtgctttcgctacctccgagactcacttcggcaactacgtcgtgggagagatcatccccctgcagcagtccatgctgttcaacagctaagagctcaagcttgtcgagaagtactagaggatcataatcagccataccacatttgtagaggttttacttgctttaaaaaacctcccacacctccccctgaacctgaaacataaaatgaatgcaattgttgttgttaacttgtttattgcagcttataatggttacaaataaagcaatagcatcacaaatttcacaaataaagcatttttttcactgcattctagttgtggtttgtccaaactcatcaatgtatcttatcatgtctggatctgatcactgcttgagcctagaagatccggctgctaacaaagcccgaaaggaagctgagttggctgctgccaccgctgagcaataactatcataacccctaggagatccgaaccagataagtgaaatctagttccaaactattttgtcatttttaattttcgtattagcttacgacgctacacccagttcccatctattttgtcactcttccctaaataatccttaaaaactccatttccacccctcccagttcccaactattttgtccgcccaca

SEQ ID NO: 2 - DNA, 12270 bp, Artificial Sequence
  Synthetic construct
ttgttccagtttggaacaagagtccactattaaagaacgtggactccaacgtcaaagggcgaaaaaccgtctatcagggcgatggcccactacgtgaaccatcaccctaatcaagttttttggggtcgaggtgccgtaaagcactaaatcggaaccctaaagggagcccccgatttagagcttgacggggaaagccggcgaacgtggcgagaaaggaagggaagaaagcgaaaggagcgggcgctagggcgctggcaagtgtagcggtcacgctgcgcgtaaccaccacacccgccgcgcttaatgcgccgctacagggcgcgtcgcgccattcgccattcaggctgcgcaactgttgggaagggcgatcggtgcgggcctcttcgctattacgccagctggcgaaagggggatgtgctgcaaggcgattaagttgggtaacgccagggttttcccagtcacgacgttgtaaaacgacggccagtgcatagaccagccgcgtaacctggcaaaatcggttacggttgagtaataaatggatgccctgcgtaagcgggtgtgggcggacaataaagtcttaaactgaacaaaatagatctaaactatgacaataaagtcttaaactagacagaatagttgtaaactgaaatcagtccagttatgctgtgaaaaagcatactggacttttgttatggctaaagcaaactcttcattttctgaagtgcaaattgcccgtcgtattaaagaggggcgtggccaagggcatggtaaagactatattcgcggcgttgtgacaatttaccgaacaactccgcggccgggaagccgatctcggcttgaacgaattgttaggtggcggtacttgggtcgatatcaaagtgcatcacttcttcccgtatgcccaactttgtatagagagccactgcgggatcgtcaccgtaatctgcttgcacgtagatcacataagcaccaagcgcgttggcctcatgcttgaggagattgatgagcgcggtggcaatgccctgcctccggtgctcgccggagactgcgagatcatagatatagatctcactacgcggctgctcaaacttgggcagaacgtaagccgcgagagcgccaacaaccgcttcttggtcgaaggcagcaagcgcgatgaatgtcttactacggagcaagttcccgaggtaatcggagtccggctgatgttgggagtaggtggctacgtctccgaactcacgaccgaaaagatcaagagcagcccgcatggatttgacttggtcagggccgagcctacatgtgcgaatgatgcccatacttgagccacctaactttgttttagggcgactgccctgctgcgtaacatcgttgctgctgcgtaacatcgttgctgctccataacatcaaacatcgacccacggcgtaacgcgcttgctgcttggatgcccgaggcatagactgtacaaaaaaacagtcataacaagccatgaaaaccgccactgcgccgttaccaccgctgcgttcggtcaaggttctggaccagttgcgtgagcgcatacgctacttgcattacagtttacgaaccgaacaggcttatgtcaactgggttcgtgccttcatccgtttccacggtgtgcgtcacccggcaaccttgggcagcagcgaagtcgaggcatttctgtcctggctggcgaacgagcgcaaggtttcggtctccacgcatcgtcaggcattggcggccttgctgttcttctacggcaaggtgctgtgcacggatctgcccttgcttcaggagatcggtagacctcggccgtcgcggcgcttgccggtggtgctgaccccggatgaagtggttcgcatcctcggttttctggaaggcgagcatcgtttgttcgcccaggactctagctatagttctagtggttggctacagctttgtttgtactatcaacaggttgaactgctgatcaacagatcctctacgcggccgcggtaccataacttcgtatagcatacattatacgaagttatctggtttaaacgtacccgtagtggctatggcagggcttgccgccccgacgttggctgcgagccctgggccttcacccgaacttgggggttggggtggggaaaaggaagaaacgcgggcgtattggtcccaatggggtctcggtggggtatcgacagagtgccagccctgggaccgaaccccgcgtttatgaacaaacgacccaacacccgtgcgttttattctgtctttttattgccgtcatagcgcgggttccttccggtattgtctccttccgtgtttcagttagcctcccccatctcccggtaccgcatgctatgcatcagctgctagcaccatggctcgagatcccgggtgatcaagtcttcgtcgagtgattgtaaataaaatgtaatttacagtatagtattttaattaatatacaaatgatttgataataattcttatttaactataatatattgtgttgggttgaattaaaggtccgtatactagtatcgattcgcgacctactccggaatattaatagatcatggagataattaaaatgataaccatctcgcaaataaataagtattttactgttttcgtaacagttttgtaataaaaaaacctataaatattccggattattcataccgtcccaccatcgggcgcggatccgccaccatggaaaactggtccgctctggaactgctgcccaaggtcggaatccctaccgacttcctgacccacgtcaagacctccgctggcgaggaaatgttcgaggctctgaggatctactacggcgacgaccccgagcgttacaacatccacttcgaggctatcttcggcaccttctgcaaccgtctggaatgggtgtacttcctgacttccggcctggctgctgctgctcacgctatcaagttccacgacctgaacaagctgaccaccggcaagatgctgttccacgtgcaagtgccccgtgtggcttccggtgctggcctgcctacctcccgtcagaccaccatcatggtcaccaagtactccgagaagtcccccatcaccatccctttcgagctgtccgctgcttgcctgacttacctgcgtgaaaccttcgagggcaccatcctggacaagatcctgaacgtcgaggctatgcacaccgtgctgcgtgctctgaagaacaccgctgacgctatggaacgtggcctgatccacagcttcctccagaccctgctgaggaaggctcccccctacttcgtggtgcagaccctggtcgagaacgctaccctggctcgtcaggctctgaaccgtatccagcgctccaacatcctgcagtccttcaaggctaagatgctggctaccctgttcctgctgaaccgtacccgtgaccgtgactacgtgctgaagttcctgacccgtctggctgaggctgctaccgactccatcctcgacaaccctactacctacaccacctcctccggtgctaagatctccggtgtcatggtgtccaccgctaacgtgatgcagatcatcatgtccctgctgtcctcccacatcactaaggaaaccgtgtccgctcccgctacctacggcaacttcgtgctgtcccccgagaacgctgtgaccgctatctcctaccactctatcctggctgacttcaactcctacaaggctcacctgacctccggccagccccacctccccaacgactccctgagccaggctggtgctcactccctgacccccctgtccatggacgtgatccgtctgggcgaaaagaccgtgatcatggaaaacctgcgtcgcgtgtacaagaacaccgacaccaaggaccccctggaacgtaacgtggacctgaccttcttcttccccgtgggcctgtacctgcccgaggaccgtggttacaccaccgtcgagtccaaggtcaagctgaacgacaccgtgcgtaacgctctgcccaccaccgcttacctgctgaacagggaccgtgctgtgcaaaagatcgacttcgtggacgctctcaagaccctgtgccaccccgtgctgcacgagcctgctccatgcctgcaggctttcaccgagcgtggtcccccatccgagcccgctatgcagcgtctgctggaatgccgtttccagcaagagcccatgggtggtgctgctcgtcgtatcccccacttctaccgtgtgcgccgcgaggtgccccgtaccgtgaacgagatgaagcaggacttcgtggtcaccgacttctacaaggttggaaacatcaccctgtacaccgagctgcaccctttcttcgacttcacccactgccaagagaactccgagactgtggctctgtgcaccccccgtatcgtgatcggcaacctgcccgacggcctggctcccggtcccttccacgagctgaggacctgggagatcatggaacacatgcgcctgcgtcccccacccgactacgaggaaaccctgcgtctgttcaagaccaccgtgacctcccccaactaccccgagctgtgctacctggtggacgtgctggtgcacggcaacgctgacgctttcctgctgatccgcgctttcatcgctcgttgcatcgtgaacatgttccacacccgtcagctgctggtgttcgctcactcctacgctctggtcaccctgatcgctgagcacctggctgacggtgctctgcccccccagctcctgttccactaccgtaacctggtggctgtgctgcgcctggtcacccgtatctccgctctgcccggcctgaacaacggccagctggctgaggaacccctgtccgcttacgtgaacgctctgcacgaccacaggctgtggccccccttcgtgacccacctccctcgtaacatggaaggtgtccaggtggtggctgatcgtcagcccctgaaccccgctaacatcgaggctcgtcaccacggtgtctccgacgtgccccgtctgggtgctatggacgctgacgagcccctgttcgtggacgactaccgtgctaccgacgacgagtggaccctgcaaaaggtgttctacctgtgcctgatccccgctatgaccaacaaccgtgcttgcggcctgggcctgaacctcaagactctgctggtggacctgttctaccgtcccgccttcctgctcatgcccgctgctaccgctgtgtccacctccggcaccacctccaaggaatccacctctggtgtcacccccgaggactccgtggctgctcagcgtcaggctgtgggcgagatgctgaccgagctggtcgaggacgtggccaccgacgctcacacccctctgctgcaggcttgccgcgagctgttcctggctgtgcagttcgtgggcgagcacgtgaaggtgctggaagtgcgtgctcccctggaccacgctcagaggcagggactgcccgacttcatctcccgtcagcatgtgctgtacaacggttgctgcgtcgtgaccgctcctaagaccctgatcgagtactccctgcccgtgcccttccaccgtttctactccaaccccaccatctgcgctgctctgtccgacgacatcaagcgttacgtgaccgagttcccccactaccatagacacgatggtggtttccccctgcccaccgctttcgctcacgagtaccacaactggctgcgtagccccttctcccgttactccgctacctgccccaacgtgctgcactccgtgatgaccctggctgctatgctgtacaagatctcccccgtgtccctggtgctgcagaccaaggctcacatccaccccggtttcgctctgaccgctgtgcgtaccgacaccttcgaggtggacatgctgctgtactccggcaagtcctgcacctccgtcatcatcaacaaccccatcgtgaccaaggaagagagggacatctccaccacctaccacgtgacccagaacatcaacaccgtggacatgggcctgggttacacctccaacacttgcgtggcctacgtgaaccgcgtccgcaccgacatgggtgtccgtgtgcaggacctgttccgtgtgttccccatgaacgtgtaccgccacgatgaggtggaccgttggatcaggcacgctgctggcgtcgagcgtccccagctgctggacaccgagactatctccatgctgaccttcggttccatgtccgagcgcaacgctgctgctaccgtgcacggccagaaggctgtctgcgagctgatcctgacccctgtgactatggacgtgaactacttcaagatcaccaacaaccctcgtggtcgtgcttcctgcatgctgggcgtggacccctacgacaccgaggctgccaccaaggctatctacgaccaccgcgaggctgacgctcagaccttcgctgctacccacaacccatgggcttcccaggctggttgcctgtccgacgtcctgtacaacacccgtcaccgcgagcgtctgggctacaactccaagttctactccccctgcgctcagtacttcaacaccgaggaaatcatcgctgccaacaagaccctcttcaagaccatcgacgagtacctgctgcgcgctaaggactgcatccgtggcgacaccgacactcagtacgtgtgcgtcgagggaaccgagcagctgatcgagaacccttgccgtctgacccaagaggctctgcccatcctgtccaccaccaccctggctctgatggaaactaagctgaagggtggcgctggtgctttcgctacctccgagactcacttcggcaactacgtcgtgggagagatcatccccctgcagcagtccatgctgttcaacagctaagagctcaagcttgtcgagaagtactagaggatcataatcagccataccacatttgtagaggttttacttgctttaaaaaacctcccacacctccccctgaacctgaaacataaaatgaatgcaattgttgttgttaacttgtttattgcagcttataatggttacaaataaagcaatagcatcacaaatttcacaaataaagcatttttttcactgcattctagttgtggtttgtccaaactcatcaatgtatcttatcatgtctggatctgatcactgcttgagcctagaagatccggctgctaacaaagcccgaaaggaagctgagttggctgctgtggctagctttgtttaactttaagaaggagatacatctagaccggaatattaatagatcatggagataattaaaatgataaccatctcgcaaataaataagtattttactgttttcgtaacagttttgtaataaaaaaacctataaatattccggattattcataccgtcccaccatcgggcgcggatcccggtccgaagcgcgcggaattcaaaggcctacgtcgacgccaccatggaatcccgtggtcgtcgttgccccgagatgatctccgtgctgggtcccatctccggtcacgtcctgaaggctgtgttctcccgtggcgacacccccgtgctgccccacgaaactcgtctgctgcagaccggtatccacgtgcgtgtgtcccagccctccctgatcctggtgtcccagtacacccccgactccaccccttgccaccgcggagacaaccagctgcaggtccagcacacctacttcaccggttccgaggtcgagaacgtgtccgtgaacgtgcacaaccccaccggtcgttccatctgcccctcccaagagcccatgtccatctacgtgtacgctctgcccctgaagatgctgaacatcccctccatcaacgtgcaccactacccctccgctgctgagcgcaagcaccgtcacctccccgtggctgacgctgtgatccacgcttccggcaagcagatgtggcaggctcgtctgaccgtgtccggcctggcttggacccgtcagcagaaccagtggaaggaacccgacgtgtactacacctccgctttcgtgttccccaccaaggacgtggccctgcgtcacgtcgtgtgcgctcacgaactcgtgtgctccatggaaaacacccgtgctaccaagatgcaagtgatcggcgaccagtacgtgaaggtgtacctggaatccttctgcgaggacgtgccctccggcaagctgttcatgcacgtgaccctgggttccgacgtggaagaggacctgaccatgacccgtaacccccagcccttcatgcgtccccacgagcgtaacggtttcaccgtgctgtgccccaagaacatgatcatcaagcccggcaagatctcccacatcatgctggacgtggccttcacctcccacgagcacttcggcctgctgtgccctaagtccatccccggcctgtccatctccggcaacctgctgatgaacggccagcagatcttcctggaagtgcaggctatccgtgaaaccgtcgagctgcgtcagtacgaccctgtggctgctctgttcttcttcgacatcgacctgctgctgcagcgtggtccccagtactccgagcaccccaccttcaccagccagtaccgtatccagggcaagctggaataccgtcacacctgggaccgtcacgacgagggtgctgctcagggcgacgacgacgtgtggacctccggttccgactccgacgaggaactggtcaccaccgagcgcaagaccccccgtgtgaccggtggtggtgctatggctggtgcttccacctccgctggtcgcaagcgcaagtccgcttcctccgctaccgcttgcaccgctggtgtcatgacccgtggtcgcctgaaggctgagtccaccgtggctcccgaagaggacactgacgaggactccgacaacgagatccacaaccccgctgtgttcacctggcccccctggcaggctggtatcctggctcgtaacctggtgcccatggtggctaccgtgcagggccagaacctgaagtaccaagagttcttctgggacgccaacgacatctaccgtatcttcgctgagctggaaggcgtgtggcagcccgctgctcagcccaagcgtcgtcgtcaccgtcaggacgctctgcctggtccctgtatcgcttccacccccaagaagcaccgcggctaaaagcttgtcgagaagtactagaggatcataatcagccataccacatttgtagaggttttacttgctttaaaaaacctcccacacctccccctgaacctgaaacataaaatgaatgcaattgttgttgttaacttgtttattgcagcttataatggttacaaataaagcaatagcatcacaaatttcacaaataaagcatttttttcactgcattctagttgtggtttgtccaaactcatcaatgtatcttatcatgtctggatctgatcactgcttgagcctagaagatccggctgctaacaaagcccgaaaggaagctgagttggctgctgccaccgctgagcaataactatcataacccccggaatattaatagatcatggagataattaaaatgataaccatctcgcaaataaataagtattttactgttttcgtaacagttttgtaataaaaaaacctataaatattccggattattcataccgtcccaccatcgggcgcggatcccggtccgaagcgcgcggaattcgccaccatgaccatggacgagcagcagccccaggctgtgacccccgtgtacgtgggcggtttcctggctcgttacgaccagtcccccgacgaggctgagctgctgctgccacgtgacgtggtcgaacactggctgcacgctcagggccagggacagccttccctgtccgtggctctgcccctgaacatcaaccacgacgacaccgctgtcgtgggtcacgtggccgctatgcagtccgtgcgtgacggcctgttctgcctgggttgcgtgacctccccccgtttcctggaaatcgtgcgtcgtgcttccgagaagtccgagctggtgtcccgtggtcccgtgtccccactgcagcccgacaaggtggtcgagttcctgtccggttcctacgctggcctgtccctgtcatcccgtcgttgcgacgacgtcgaggctgctacctccctgagcggctccgagactacccccttcaagcacgtggccctgtgctccgtgggtcgtaggcgtggaaccctggctgtgtacggtcgtgaccccgagtgggtcacccagcgtttccccgacctgaccgctgctgaccgtgacggactgcgtgctcagtggcagcgttgcggttccaccgctgtggacgcttccggcgaccccttccgttccgactcctacggcctgctgggcaactccgtggacgctctgtacatccgcgagcgtctgcccaagctgcgttacgacaagcagctcgtgggtgtcaccgagcgcgagtcctacgtgaaggcttccgtgtcccccgaggctgcttgcgacatcaaggctgcttccgctgagcgttctggcgacagccgctcccaggctgctactcctgctgctggtgctcgtgtgccctccagctccccatccccacctgtcgagcctccctcccccgtgcaacctcctgctctgcctgcttccccctccgtgctgcctgctgagtccagcccctccctgtcaccctctgagcctgctgaggctgcctccatgtcccaccctctgagcgctgctgtgactgctgctaccgctccccctggtgctactgtggctggtgcttcccccgctgtgccttccctggcttggcctcacgacggtgtctacctgcccaaggacgctttcttctccctgctgggcgcttcccgttccgctgctcccgtgatgtaccccggtgctgtggctgctccccccagcgcttcacctgctcctctgcccctgccctcctaccccgcttcctacggtgctcccgtcgtgggttacgaccagctggctgctcgtcacttcgctgactacgtggacccccactaccccggctggggtcgtcgttacgagcccgctccttccctgcacccatcctaccctgtgccccctcctccatcacccgcttactaccgtcgtcgtgactcccccggtggcatggacgagcctccatctggatgggagcgttacgacggttcccaccgtggccagtcccaaaagcagcaccgtcacggtggttccggtggtcacaacaagcgtcgcaaggaagccgctgctgcatcctccagctccgacgaggacctgagcttccccggcgaggctgaacacggtcgtgctcgcaagcgtctgaagtcccacgtgaactccgacggaggtagcggaggccacgctggttccaaccagcagcagcaacagcgctacgacgagctgcgtgacgctatccacgagctgaagcgtgacctgttcgctgctcgccagtcctccaccctgctgtctgctgctctgccagctgccgcttcttcctcccctaccaccaccaccgtgtgcacccctactggcgagctgacctctggtggtggcgagactcccaccgctctgctgtccggtggtgctaaggtggccgagcgtgctcaggctggtgtcgtgaacgcttcctgccgtctggctaccgcttccggttccgaggctgccaccgctggtccctctaccgctggttcctcatcctgcccagcttccgtggtgctggctgccgctgctgctcaagccgccgctgcttcacagtcccccccaaaggatatggtggacctgaaccgtcgtatcttcgtggctgctctgaacaagctcgagtaataaaagcttgtcgagaagtactagaggatcataatcagccataccacatttgtagaggttttacttgctttaaaaaacctcccacacctccccctgaacctgaaacataaaatgaatgcaattgttgttgttaacttgtttattgcagcttataatggttacaaataaagcaatagcatcacaaatttcacaaataaagcatttttttcactgcattctagttgtggtttgtccaaactcatcaatgtatcttatcatgtctggatctgatcactgcttgagcctagaagatccggctgctaacaaagcccgaaaggaagctgagttggctgctgccaccgctgagcaataactatcataacccctaggagatccgaaccagataagtgaaatctagttccaaactattttgtcatttttaattttcgtattagcttacgacgctacacccagttcccatctattttgtcactcttccctaaataatccttaaaaactccatttccacccctcccagttcccaactattttgtccgcccaca

SEQ ID NO: 3 - DNA, 13669 bp, Artificial Sequence
  Synthetic construct
ttgttccagtttggaacaagagtccactattaaagaacgtggactccaacgtcaaagggcgaaaaaccgtctatcagggcgatggcccactacgtgaaccatcaccctaatcaagttttttggggtcgaggtgccgtaaagcactaaatcggaaccctaaagggagcccccgatttagagcttgacggggaaagccggcgaacgtggcgagaaaggaagggaagaaagcgaaaggagcgggcgctagggcgctggcaagtgtagcggtcacgctgcgcgtaaccaccacacccgccgcgcttaatgcgccgctacagggcgcgtcgcgccattcgccattcaggctgcgcaactgttgggaagggcgatcggtgcgggcctcttcgctattacgccagctggcgaaagggggatgtgctgcaaggcgattaagttgggtaacgccagggttttcccagtcacgacgttgtaaaacgacggccagtgcatagaccagccgcgtaacctggcaaaatcggttacggttgagtaataaatggatgccctgcgtaagcgggtgtgggcggacaataaagtcttaaactgaacaaaatagatctaaactatgacaataaagtcttaaactagacagaatagttgtaaactgaaatcagtccagttatgctgtgaaaaagcatactggacttttgttatggctaaagcaaactcttcattttctgaagtgcaaattgcccgtcgtattaaagaggggcgtggccaagggcatggtaaagactatattcgcggcgttgtgacaatttaccgaacaactccgcggccgggaagccgatctcggcttgaacgaattgttaggtggcggtacttgggtcgatatcaaagtgcatcacttcttcccgtatgcccaactttgtatagagagccactgcgggatcgtcaccgtaatctgcttgcacgtagatcacataagcaccaagcgcgttggcctcatgcttgaggagattgatgagcgcggtggcaatgccctgcctccggtgctcgccggagactgcgagatcatagatatagatctcactacgcggctgctcaaacttgggcagaacgtaagccgcgagagcgccaacaaccgcttcttggtcgaaggcagcaagcgcgatgaatgtcttactacggagcaagttcccgaggtaatcggagtccggctgatgttgggagtaggtggctacgtctccgaactcacgaccgaaaagatcaagagcagcccgcatggatttgacttggtcagggccgagcctacatgtgcgaatgatgcccatacttgagccacctaactttgttttagggcgactgccctgctgcgtaacatcgttgctgctgcgtaacatcgttgctgctccataacatcaaacatcgacccacggcgtaacgcgcttgctgcttggatgcccgaggcatagactgtacaaaaaaacagtcataacaagccatgaaaaccgccactgcgccgttaccaccgctgcgttcggtcaaggttctggaccagttgcgtgagcgcatacgctacttgcattacagtttacgaaccgaacaggcttatgtcaactgggttcgtgccttcatccgtttccacggtgtgcgtcacccggcaaccttgggcagcagcgaagtcgaggcatttctgtcctggctggcgaacgagcgcaaggtttcggtctccacgcatcgtcaggcattggcggccttgctgttcttctacggcaaggtgctgtgcacggatctgcccttgcttcaggagatcggtagacctcggccgtcgcggcgcttgccggtggtgctgaccccggatgaagtggttcgcatcctcggttttctggaaggcgagcatcgtttgttcgcccaggactctagctatagttctagtggttggctacagctttgtttgtactatcaacaggttgaactgctgatcaacagatcctctacgcggccgcggtaccataacttcgtatagcatacattatacgaagttatctggtttaaacgtacccgtagtggctatggcagggcttgccgccccgacgttggctgcgagccctgggccttcacccgaacttgggggttggggtggggaaaaggaagaaacgcgggcgtattggtcccaatggggtctcggtggggtatcgacagagtgccagccctgggaccgaaccccgcgtttatgaacaaacgacccaacacccgtgcgttttattctgtctttttattgccgtcatagcgcgggttccttccggtattgtctccttccgtgtttcagttagcctcccccatctcccggtaccgcatgctatgcatcagctgctagcaccatggctcgagatcccgggtgatcaagtcttcgtcgagtgattgtaaataaaatgtaatttacagtatagtattttaattaatatacaaatgatttgataataattcttatttaactataatatattgtgttgggttgaattaaaggtccgtatactagtatcgattcgcgacctactccggaatattaatagatcatggagataattaaaatgataaccatctcgcaaataaataagtattttactgttttcgtaacagttttgtaataaaaaaacctataaatattccggattattcataccgtcccaccatcgggcgcggatccgccaccatggaaaactggtccgctctggaactgctgcccaaggtcggaatccctaccgacttcctgacccacgtcaagacctccgctggcgaggaaatgttcgaggctctgaggatctactacggcgacgaccccgagcgttacaacatccacttcgaggctatcttcggcaccttctgcaaccgtctggaatgggtgtacttcctgacttccggcctggctgctgctgctcacgctatcaagttccacgacctgaacaagctgaccaccggcaagatgctgttccacgtgcaagtgccccgtgtggcttccggtgctggcctgcctacctcccgtcagaccaccatcatggtcaccaagtactccgagaagtcccccatcaccatccctttcgagctgtccgctgcttgcctgacttacctgcgtgaaaccttcgagggcaccatcctggacaagatcctgaacgtcgaggctatgcacaccgtgctgcgtgctctgaagaacaccgctgacgctatggaacgtggcctgatccacagcttcctccagaccctgctgaggaaggctcccccctacttcgtggtgcagaccctggtcgagaacgctaccctggctcgtcaggctctgaaccgtatccagcgctccaacatcctgcagtccttcaaggctaagatgctggctaccctgttcctgctgaaccgtacccgtgaccgtgactacgtgctgaagttcctgacccgtctggctgaggctgctaccgactccatcctcgacaaccctactacctacaccacctcctccggtgctaagatctccggtgtcatggtgtccaccgctaacgtgatgcagatcatcatgtccctgctgtcctcccacatcactaaggaaaccgtgtccgctcccgctacctacggcaacttcgtgctgtcccccgagaacgctgtgaccgctatctcctaccactctatcctggctgacttcaactcctacaaggctcacctgacctccggccagccccacctccccaacgactccctgagccaggctggtgctcactccctgacccccctgtccatggacgtgatccgtctgggcgaaaagaccgtgatcatggaaaacctgcgtcgcgtgtacaagaacaccgacaccaaggaccccctggaacgtaacgtggacctgaccttcttcttccccgtgggcctgtacctgcccgaggaccgtggttacaccaccgtcgagtccaaggtcaagctgaacgacaccgtgcgtaacgctctgcccaccaccgcttacctgctgaacagggaccgtgctgtgcaaaagatcgacttcgtggacgctctcaagaccctgtgccaccccgtgctgcacgagcctgctccatgcctgcaggctttcaccgagcgtggtcccccatccgagcccgctatgcagcgtctgctggaatgccgtttccagcaagagcccatgggtggtgctgctcgtcgtatcccccacttctaccgtgtgcgccgcgaggtgccccgtaccgtgaacgagatgaagcaggacttcgtggtcaccgacttctacaaggttggaaacatcaccctgtacaccgagctgcaccctttcttcgacttcacccactgccaagagaactccgagactgtggctctgtgcaccccccgtatcgtgatcggcaacctgcccgacggcctggctcccggtcccttccacgagctgaggacctgggagatcatggaacacatgcgcctgcgtcccccacccgactacgaggaaaccctgcgtctgttcaagaccaccgtgacctcccccaactaccccgagctgtgctacctggtggacgtgctggtgcacggcaacgctgacgctttcctgctgatccgcgctttcatcgctcgttgcatcgtgaacatgttccacacccgtcagctgctggtgttcgctcactcctacgctctggtcaccctgatcgctgagcacctggctgacggtgctctgcccccccagctcctgttccactaccgtaacctggtggctgtgctgcgcctggtcacccgtatctccgctctgcccggcctgaacaacggccagctggctgaggaacccctgtccgcttacgtgaacgctctgcacgaccacaggctgtggccccccttcgtgacccacctccctcgtaacatggaaggtgtccaggtggtggctgatcgtcagcccctgaaccccgctaacatcgaggctcgtcaccacggtgtctccgacgtgccccgtctgggtgctatggacgctgacgagcccctgttcgtggacgactaccgtgctaccgacgacgagtggaccctgcaaaaggtgttctacctgtgcctgatccccgctatgaccaacaaccgtgcttgcggcctgggcctgaacctcaagactctgctggtggacctgttctaccgtcccgccttcctgctcatgcccgctgctaccgctgtgtccacctccggcaccacctccaaggaatccacctctggtgtcacccccgaggactccgtggctgctcagcgtcaggctgtgggcgagatgctgaccgagctggtcgaggacgtggccaccgacgctcacacccctctgctgcaggcttgccgcgagctgttcctggctgtgcagttcgtgggcgagcacgtgaaggtgctggaagtgcgtgctcccctggaccacgctcagaggcagggactgcccgacttcatctcccgtcagcatgtgctgtacaacggttgctgcgtcgtgaccgctcctaagaccctgatcgagtactccctgcccgtgcccttccaccgtttctactccaaccccaccatctgcgctgctctgtccgacgacatcaagcgttacgtgaccgagttcccccactaccatagacacgatggtggtttccccctgcccaccgctttcgctcacgagtaccacaactggctgcgtagccccttctcccgttactccgctacctgccccaacgtgctgcactccgtgatgaccctggctgctatgctgtacaagatctcccccgtgtccctggtgctgcagaccaaggctcacatccaccccggtttcgctctgaccgctgtgcgtaccgacaccttcgaggtggacatgctgctgtactccggcaagtcctgcacctccgtcatcatcaacaaccccatcgtgaccaaggaagagagggacatctccaccacctaccacgtgacccagaacatcaacaccgtggacatgggcctgggttacacctccaacacttgcgtggcctacgtgaaccgcgtccgcaccgacatgggtgtccgtgtgcaggacctgttccgtgtgttccccatgaacgtgtaccgccacgatgaggtggaccgttggatcaggcacgctgctggcgtcgagcgtccccagctgctggacaccgagactatctccatgctgaccttcggttccatgtccgagcgcaacgctgctgctaccgtgcacggccagaaggctgtctgcgagctgatcctgacccctgtgactatggacgtgaactacttcaagatcaccaacaaccctcgtggtcgtgcttcctgcatgctgggcgtggacccctacgacaccgaggctgccaccaaggctatctacgaccaccgcgaggctgacgctcagaccttcgctgctacccacaacccatgggcttcccaggctggttgcctgtccgacgtcctgtacaacacccgtcaccgcgagcgtctgggctacaactccaagttctactccccctgcgctcagtacttcaacaccgaggaaatcatcgctgccaacaagaccctcttcaagaccatcgacgagtacctgctgcgcgctaaggactgcatccgtggcgacaccgacactcagtacgtgtgcgtcgagggaaccgagcagctgatcgagaacccttgccgtctgacccaagaggctctgcccatcctgtccaccaccaccctggctctgatggaaactaagctgaagggtggcgctggtgctttcgctacctccgagactcacttcggcaactacgtcgtgggagagatcatccccctgcagcagtccatgctgttcaacagctaagagctcaagcttgtcgagaagtactagaggatcataatcagccataccacatttgtagaggttttacttgctttaaaaaacctcccacacctccccctgaacctgaaacataaaatgaatgcaattgttgttgttaacttgtttattgcagcttataatggttacaaataaagcaatagcatcacaaatttcacaaataaagcatttttttcactgcattctagttgtggtttgtccaaactcatcaatgtatcttatcatgtctggatctgatcactgcttgagcctagaagatccggctgctaacaaagcccgaaaggaagctgagttggctgctgtggctagctttgtttaactttaagaaggagatacatctagaccggaatattaatagatcatggagataattaaaatgataaccatctcgcaaataaataagtattttactgttttcgtaacagttttgtaataaaaaaacctataaatattccggattattcataccgtcccaccatcgggcgcggatcccggtccgaagcgcgcggaattcaaaggcctacgtcgacgccaccatggaatcccgtggtcgtcgttgccccgagatgatctccgtgctgggtcccatctccggtcacgtcctgaaggctgtgttctcccgtggcgacacccccgtgctgccccacgaaactcgtctgctgcagaccggtatccacgtgcgtgtgtcccagccctccctgatcctggtgtcccagtacacccccgactccaccccttgccaccgcggagacaaccagctgcaggtccagcacacctacttcaccggttccgaggtcgagaacgtgtccgtgaacgtgcacaaccccaccggtcgttccatctgcccctcccaagagcccatgtccatctacgtgtacgctctgcccctgaagatgctgaacatcccctccatcaacgtgcaccactacccctccgctgctgagcgcaagcaccgtcacctccccgtggctgacgctgtgatccacgcttccggcaagcagatgtggcaggctcgtctgaccgtgtccggcctggcttggacccgtcagcagaaccagtggaaggaacccgacgtgtactacacctccgctttcgtgttccccaccaaggacgtggccctgcgtcacgtcgtgtgcgctcacgaactcgtgtgctccatggaaaacacccgtgctaccaagatgcaagtgatcggcgaccagtacgtgaaggtgtacctggaatccttctgcgaggacgtgccctccggcaagctgttcatgcacgtgaccctgggttccgacgtggaagaggacctgaccatgacccgtaacccccagcccttcatgcgtccccacgagcgtaacggtttcaccgtgctgtgccccaagaacatgatcatcaagcccggcaagatctcccacatcatgctggacgtggccttcacctcccacgagcacttcggcctgctgtgccctaagtccatccccggcctgtccatctccggcaacctgctgatgaacggccagcagatcttcctggaagtgcaggctatccgtgaaaccgtcgagctgcgtcagtacgaccctgtggctgctctgttcttcttcgacatcgacctgctgctgcagcgtggtccccagtactccgagcaccccaccttcaccagccagtaccgtatccagggcaagctggaataccgtcacacctgggaccgtcacgacgagggtgctgctcagggcgacgacgacgtgtggacctccggttccgactccgacgaggaactggtcaccaccgagcgcaagaccccccgtgtgaccggtggtggtgctatggctggtgcttccacctccgctggtcgcaagcgcaagtccgcttcctccgctaccgcttgcaccgctggtgtcatgacccgtggtcgcctgaaggctgagtccaccgtggctcccgaagaggacactgacgaggactccgacaacgagatccacaaccccgctgtgttcacctggcccccctggcaggctggtatcctggctcgtaacctggtgcccatggtggctaccgtgcagggccagaacctgaagtaccaagagttcttctgggacgccaacgacatctaccgtatcttcgctgagctggaaggcgtgtggcagcccgctgctcagcccaagcgtcgtcgtcaccgtcaggacgctctgcctggtccctgtatcgcttccacccccaagaagcaccgcggctaaaagcttgtcgagaagtactagaggatcataatcagccataccacatttgtagaggttttacttgctttaaaaaacctcccacacctccccctgaacctgaaacataaaatgaatgcaattgttgttgttaacttgtttattgcagcttataatggttacaaataaagcaatagcatcacaaatttcacaaataaagcatttttttcactgcattctagttgtggtttgtccaaactcatcaatgtatcttatcatgtctggatctgatcactgcttgagcctagaagatccggctgctaacaaagcccgaaaggaagctgagttggctgctgccaccgctgagcaataactatcataaccggaatattaatagatcatggagataattaaaatgataaccatctcgcaaataaataagtattttactgttttcgtaacagttttgtaataaaaaaacctataaatattccggattattcataccgtcccaccatcgggcgcggatcccggtccgaagcgcgcggaattcgccaccatgaccatggacgagcagcagccccaggctgtgacccccgtgtacgtgggcggtttcctggctcgttacgaccagtcccccgacgaggctgagctgctgctgccacgtgacgtggtcgaacactggctgcacgctcagggccagggacagccttccctgtccgtggctctgcccctgaacatcaaccacgacgacaccgctgtcgtgggtcacgtggccgctatgcagtccgtgcgtgacggcctgttctgcctgggttgcgtgacctccccccgtttcctggaaatcgtgcgtcgtgcttccgagaagtccgagctggtgtcccgtggtcccgtgtccccactgcagcccgacaaggtggtcgagttcctgtccggttcctacgctggcctgtccctgtcatcccgtcgttgcgacgacgtcgaggctgctacctccctgagcggctccgagactacccccttcaagcacgtggccctgtgctccgtgggtcgtaggcgtggaaccctggctgtgtacggtcgtgaccccgagtgggtcacccagcgtttccccgacctgaccgctgctgaccgtgacggactgcgtgctcagtggcagcgttgcggttccaccgctgtggacgcttccggcgaccccttccgttccgactcctacggcctgctgggcaactccgtggacgctctgtacatccgcgagcgtctgcccaagctgcgttacgacaagcagctcgtgggtgtcaccgagcgcgagtcctacgtgaaggcttccgtgtcccccgaggctgcttgcgacatcaaggctgcttccgctgagcgttctggcgacagccgctcccaggctgctactcctgctgctggtgctcgtgtgccctccagctccccatccccacctgtcgagcctccctcccccgtgcaacctcctgctctgcctgcttccccctccgtgctgcctgctgagtccagcccctccctgtcaccctctgagcctgctgaggctgcctccatgtcccaccctctgagcgctgctgtgactgctgctaccgctccccctggtgctactgtggctggtgcttcccccgctgtgccttccctggcttggcctcacgacggtgtctacctgcccaaggacgctttcttctccctgctgggcgcttcccgttccgctgctcccgtgatgtaccccggtgctgtggctgctccccccagcgcttcacctgctcctctgcccctgccctcctaccccgcttcctacggtgctcccgtcgtgggttacgaccagctggctgctcgtcacttcgctgactacgtggacccccactaccccggctggggtcgtcgttacgagcccgctccttccctgcacccatcctaccctgtgccccctcctccatcacccgcttactaccgtcgtcgtgactcccccggtggcatggacgagcctccatctggatgggagcgttacgacggttcccaccgtggccagtcccaaaagcagcaccgtcacggtggttccggtggtcacaacaagcgtcgcaaggaagccgctgctgcatcctccagctccgacgaggacctgagcttccccggcgaggctgaacacggtcgtgctcgcaagcgtctgaagtcccacgtgaactccgacggaggtagcggaggccacgctggttccaaccagcagcagcaacagcgctacgacgagctgcgtgacgctatccacgagctgaagcgtgacctgttcgctgctcgccagtcctccaccctgctgtctgctgctctgccagctgccgcttcttcctcccctaccaccaccaccgtgtgcacccctactggcgagctgacctctggtggtggcgagactcccaccgctctgctgtccggtggtgctaaggtggccgagcgtgctcaggctggtgtcgtgaacgcttcctgccgtctggctaccgcttccggttccgaggctgccaccgctggtccctctaccgctggttcctcatcctgcccagcttccgtggtgctggctgccgctgctgctcaagccgccgctgcttcacagtcccccccaaaggatatggtggacctgaaccgtcgtatcttcgtggctgctctgaacaagctcgagtaataaaagcttgtcgagaagtactagaggatcataatcagccataccacatttgtagaggttttacttgctttaaaaaacctcccacacctccccctgaacctgaaacataaaatgaatgcaattgttgttgttaacttgtttattgcagcttataatggttacaaataaagcaatagcatcacaaatttcacaaataaagcatttttttcactgcattctagttgtggtttgtccaaactcatcaatgtatcttatcatgtctggatctgatcactgcttgagcctagaagatccggctgctaacaaagcccgaaaggaagctgggaatattaatagatcatggagataattaaaatgataaccatctcgcaaataaataagtattttactgttttcgtaacagttttgtaataaaaaaacctataaatattccggattattcataccgtcccaccatcgggcgcggatccgccaccatggctgctatggaagctaacatcttctgcaccttcgaccacaagctgtctatcgctgacgtgggcaagctgaccaagctggtggctgctgtggtgcccatcccccagcgtctgcacctgatcaagcactaccagctgggcctgcaccagttcgtggaccacacccgtggttacgtgcgtctgcgtggcctgctgcgtaacatgaccctgaccctgatgcgtcgtgtcgagggcaaccagatcctgctgcacgtgcccacccacggcctgctgtacaccgtgctgaacaccggtcccgtgacctgggagaagggcgacgctctgtgcgtgctgccccccctgttccacggtcccctggctcgtgaaaacctgttgaccctgggccagtgggagctggtgctgccctggatcgtgcccatgcccctggctctggaaatcaaccagcgcctgctgatcatgggcctgttctccctggaccgttcctacgaagaagtgaaggctgctgtccagcagctgcagaccatcaccttccgtgacgctaccttcaccatccccgaccccgtgatcgaccagcacctcctgatcgacatgaagaccgcttgcctgtccatgtccatggtggctaacctggcttccgagctgaccatgacctacgtccgcaagctggctttggaggactcttccatgctgctggtcaagtgccaagagctgctgatgcgtctggaccgcgagcgttccgtgggcgagcctcgtactcccgctcgtcctcagcacgtgtcccccgacgacgagatcgctcgtctgtccgctctgttcgtgatgctgcgtcagctggacgacctgatccgcgagcaggtcgtgttcaccgtgtgcgacgtgagcccagacaacaagtccgctacctgcatcttcaagggctaaggcgcgccaagcttgtcgagaagtactagaggatcataatcagccataccacatttgtagaggttttacttgctttaaaaaacctcccacacctccccctgaacctgaaacataaaatgaatgcaattgttgttgttaacttgtttattgcagcttataatggttacaaataaagcaatagcatcacaaatttcacaaataaagcatttttttcactgcattctagttgtggtttgtccaaactcatcaatgtatcttatcatgtctggatctgatcactgcttgagcctagaagatccggctgctaacaaagcccgaaaggaagctgagttggctgctgccaccgctgagcaataactatcataacccctaggagatccgaaccagataagtgaaatctagttccaaactattttgtcatttttaattttcgtattagcttacgacgctacacccagttcccatctattttgtcactcttccctaaataatccttaaaaactccatttccacccctcccagttcccaactattttgtccgcccaca

SEQ ID NO: 4 - DNA, 12749 bp, Artificial Sequence
  Synthetic construct
ttgttccagtttggaacaagagtccactattaaagaacgtggactccaacgtcaaagggcgaaaaaccgtctatcagggcgatggcccactacgtgaaccatcaccctaatcaagttttttggggtcgaggtgccgtaaagcactaaatcggaaccctaaagggagcccccgatttagagcttgacggggaaagccggcgaacgtggcgagaaaggaagggaagaaagcgaaaggagcgggcgctagggcgctggcaagtgtagcggtcacgctgcgcgtaaccaccacacccgccgcgcttaatgcgccgctacagggcgcgtcgcgccattcgccattcaggctgcgcaactgttgggaagggcgatcggtgcgggcctcttcgctattacgccagctggcgaaagggggatgtgctgcaaggcgattaagttgggtaacgccagggttttcccagtcacgacgttgtaaaacgacggccagtgcatagaccagccgcgtaacctggcaaaatcggttacggttgagtaataaatggatgccctgcgtaagcgggtgtgggcggacaataaagtcttaaactgaacaaaatagatctaaactatgacaataaagtcttaaactagacagaatagttgtaaactgaaatcagtccagttatgctgtgaaaaagcatactggacttttgttatggctaaagcaaactcttcattttctgaagtgcaaattgcccgtcgtattaaagaggggcgtggccaagggcatggtaaagactatattcgcggcgttgtgacaatttaccgaacaactccgcggccgggaagccgatctcggcttgaacgaattgttaggtggcggtacttgggtcgatatcaaagtgcatcacttcttcccgtatgcccaactttgtatagagagccactgcgggatcgtcaccgtaatctgcttgcacgtagatcacataagcaccaagcgcgttggcctcatgcttgaggagattgatgagcgcggtggcaatgccctgcctccggtgctcgccggagactgcgagatcatagatatagatctcactacgcggctgctcaaacttgggcagaacgtaagccgcgagagcgccaacaaccgcttcttggtcgaaggcagcaagcgcgatgaatgtcttactacggagcaagttcccgaggtaatcggagtccggctgatgttgggagtaggtggctacgtctccgaactcacgaccgaaaagatcaagagcagcccgcatggatttgacttggtcagggccgagcctacatgtgcgaatgatgcccatacttgagccacctaactttgttttagggcgactgccctgctgcgtaacatcgttgctgctgcgtaacatcgttgctgctccataacatcaaacatcgacccacggcgtaacgcgcttgctgcttggatgcccgaggcatagactgtacaaaaaaacagtcataacaagccatgaaaaccgccactgcgccgttaccaccgctgcgttcggtcaaggttctggaccagttgcgtgagcgcatacgctacttgcattacagtttacgaaccgaacaggcttatgtcaactgggttcgtgccttcatccgtttccacggtgtgcgtcacccggcaaccttgggcagcagcgaagtcgaggcatttctgtcctggctggcgaacgagcgcaaggtttcggtctccacgcatcgtcaggcattggcggccttgctgttcttctacggcaaggtgctgtgcacggatctgcccttgcttcaggagatcggtagacctcggccgtcgcggcgcttgccggtggtgctgaccccggatgaagtggttcgcatcctcggttttctggaaggcgagcatcgtttgttcgcccaggactctagctatagttctagtggttggctacagctttgtttgtactatcaacaggttgaactgctgatcaacagatcctctacgcggccgcggtaccataacttcgtatagcatacattatacgaagttatctggtttaaacgtacccgtagtggctatggcagggcttgccgccccgacgttggctgcgagccctgggccttcacccgaacttgggggttggggtggggaaaaggaagaaacgcgggcgtattggtcccaatggggtctcggtggggtatcgacagagtgccagccctgggaccgaaccccgcgtttatgaacaaacgacccaacacccgtgcgttttattctgtctttttattgccgtcatagcgcgggttccttccggtattgtctccttccgtgtttcagttagcctcccccatctcccggtaccgcatgctatgcatcagctgctagcaccatggctcgagatcccgggtgatcaagtcttcgtcgagtgattgtaaataaaatgtaatttacagtatagtattttaattaatatacaaatgatttgataataattcttatttaactataatatattgtgttgggttgaattaaaggtccgtatactagtatcgattcgcgacctactccggaatattaatagatcatggagataattaaaatgataaccatctcgcaaataaataagtattttactgttttcgtaacagttttgtaataaaaaaacctataaatattccggattattcataccgtcccaccatcgggcgcggatccgccaccatggaaaactggtccgctctggaactgctgcccaaggtcggaatccctaccgacttcctgacccacgtcaagacctccgctggcgaggaaatgttcgaggctctgaggatctactacggcgacgaccccgagcgttacaacatccacttcgaggctatcttcggcaccttctgcaaccgtctggaatgggtgtacttcctgacttccggcctggctgctgctgctcacgctatcaagttccacgacctgaacaagctgaccaccggcaagatgctgttccacgtgcaagtgccccgtgtggcttccggtgctggcctgcctacctcccgtcagaccaccatcatggtcaccaagtactccgagaagtcccccatcaccatccctttcgagctgtccgctgcttgcctgacttacctgcgtgaaaccttcgagggcaccatcctggacaagatcctgaacgtcgaggctatgcacaccgtgctgcgtgctctgaagaacaccgctgacgctatggaacgtggcctgatccacagcttcctccagaccctgctgaggaaggctcccccctacttcgtggtgcagaccctggtcgagaacgctaccctggctcgtcaggctctgaaccgtatccagcgctccaacatcctgcagtccttcaaggctaagatgctggctaccctgttcctgctgaaccgtacccgtgaccgtgactacgtgctgaagttcctgacccgtctggctgaggctgctaccgactccatcctcgacaaccctactacctacaccacctcctccggtgctaagatctccggtgtcatggtgtccaccgctaacgtgatgcagatcatcatgtccctgctgtcctcccacatcactaaggaaaccgtgtccgctcccgctacctacggcaacttcgtgctgtcccccgagaacgctgtgaccgctatctcctaccactctatcctggctgacttcaactcctacaaggctcacctgacctccggccagccccacctccccaacgactccctgagccaggctggtgctcactccctgacccccctgtccatggacgtgatccgtctgggcgaaaagaccgtgatcatggaaaacctgcgtcgcgtgtacaagaacaccgacaccaaggaccccctggaacgtaacgtggacctgaccttcttcttccccgtgggcctgtacctgcccgaggaccgtggttacaccaccgtcgagtccaaggtcaagctgaacgacaccgtgcgtaacgctctgcccaccaccgcttacctgctgaacagggaccgtgctgtgcaaaagatcgacttcgtggacgctctcaagaccctgtgccaccccgtgctgcacgagcctgctccatgcctgcaggctttcaccgagcgtggtcccccatccgagcccgctatgcagcgtctgctggaatgccgtttccagcaagagcccatgggtggtgctgctcgtcgtatcccccacttctaccgtgtgcgccgcgaggtgccccgtaccgtgaacgagatgaagcaggacttcgtggtcaccgacttctacaaggttggaaacatcaccctgtacaccgagctgcaccctttcttcgacttcacccactgccaagagaactccgagactgtggctctgtgcaccccccgtatcgtgatcggcaacctgcccgacggcctggctcccggtcccttccacgagctgaggacctgggagatcatggaacacatgcgcctgcgtcccccacccgactacgaggaaaccctgcgtctgttcaagaccaccgtgacctcccccaactaccccgagctgtgctacctggtggacgtgctggtgcacggcaacgctgacgctttcctgctgatccgcgctttcatcgctcgttgcatcgtgaacatgttccacacccgtcagctgctggtgttcgctcactcctacgctctggtcaccctgatcgctgagcacctggctgacggtgctctgcccccccagctcctgttccactaccgtaacctggtggctgtgctgcgcctggtcacccgtatctccgctctgcccggcctgaacaacggccagctggctgaggaacccctgtccgcttacgtgaacgctctgcacgaccacaggctgtggccccccttcgtgacccacctccctcgtaacatggaaggtgtccaggtggtggctgatcgtcagcccctgaaccccgctaacatcgaggctcgtcaccacggtgtctccgacgtgccccgtctgggtgctatggacgctgacgagcccctgttcgtggacgactaccgtgctaccgacgacgagtggaccctgcaaaaggtgttctacctgtgcctgatccccgctatgaccaacaaccgtgcttgcggcctgggcctgaacctcaagactctgctggtggacctgttctaccgtcccgccttcctgctcatgcccgctgctaccgctgtgtccacctccggcaccacctccaaggaatccacctctggtgtcacccccgaggactccgtggctgctcagcgtcaggctgtgggcgagatgctgaccgagctggtcgaggacgtggccaccgacgctcacacccctctgctgcaggcttgccgcgagctgttcctggctgtgcagttcgtgggcgagcacgtgaaggtgctggaagtgcgtgctcccctggaccacgctcagaggcagggactgcccgacttcatctcccgtcagcatgtgctgtacaacggttgctgcgtcgtgaccgctcctaagaccctgatcgagtactccctgcccgtgcccttccaccgtttctactccaaccccaccatctgcgctgctctgtccgacgacatcaagcgttacgtgaccgagttcccccactaccatagacacgatggtggtttccccctgcccaccgctttcgctcacgagtaccacaactggctgcgtagccccttctcccgttactccgctacctgccccaacgtgctgcactccgtgatgaccctggctgctatgctgtacaagatctcccccgtgtccctggtgctgcagaccaaggctcacatccaccccggtttcgctctgaccgctgtgcgtaccgacaccttcgaggtggacatgctgctgtactccggcaagtcctgcacctccgtcatcatcaacaaccccatcgtgaccaaggaagagagggacatctccaccacctaccacgtgacccagaacatcaacaccgtggacatgggcctgggttacacctccaacacttgcgtggcctacgtgaaccgcgtccgcaccgacatgggtgtccgtgtgcaggacctgttccgtgtgttccccatgaacgtgtaccgccacgatgaggtggaccgttggatcaggcacgctgctggcgtcgagcgtccccagctgctggacaccgagactatctccatgctgaccttcggttccatgtccgagcgcaacgctgctgctaccgtgcacggccagaaggctgtctgcgagctgatcctgacccctgtgactatggacgtgaactacttcaagatcaccaacaaccctcgtggtcgtgcttcctgcatgctgggcgtggacccctacgacaccgaggctgccaccaaggctatctacgaccaccgcgaggctgacgctcagaccttcgctgctacccacaacccatgggcttcccaggctggttgcctgtccgacgtcctgtacaacacccgtcaccgcgagcgtctgggctacaactccaagttctactccccctgcgctcagtacttcaacaccgaggaaatcatcgctgccaacaagaccctcttcaagaccatcgacgagtacctgctgcgcgctaaggactgcatccgtggcgacaccgacactcagtacgtgtgcgtcgagggaaccgagcagctgatcgagaacccttgccgtctgacccaagaggctctgcccatcctgtccaccaccaccctggctctgatggaaactaagctgaagggtggcgctggtgctttcgctacctccgagactcacttcggcaactacgtcgtgggagagatcatccccctgcagcagtccatgctgttcaacagctaagagctcaagcttgtcgagaagtactagaggatcataatcagccataccacatttgtagaggttttacttgctttaaaaaacctcccacacctccccctgaacctgaaacataaaatgaatgcaattgttgttgttaacttgtttattgcagcttataatggttacaaataaagcaatagcatcacaaatttcacaaataaagcatttttttcactgcattctagttgtggtttgtccaaactcatcaatgtatcttatcatgtctggatctgatcactgcttgagcctagaagatccggctgctaacaaagcccgaaaggaagctgagttggctgctgcccaccgctgagcaataactatcataacccccggaatattaatagatcatggagataattaaaatgataaccatctcgcaaataaataagtattttactgttttcgtaacagttttgtaataaaaaaacctataaatattccggattattcataccgtcccaccatcgggcgcggatccgccaccatggctgctatggaagctaacatcttctgcaccttcgaccacaagctgtctatcgctgacgtgggcaagctgaccaagctggtggctgctgtggtgcccatcccccagcgtctgcacctgatcaagcactaccagctgggcctgcaccagttcgtggaccacacccgtggttacgtgcgtctgcgtggcctgctgcgtaacatgaccctgaccctgatgcgtcgtgtcgagggcaaccagatcctgctgcacgtgcccacccacggcctgctgtacaccgtgctgaacaccggtcccgtgacctgggagaagggcgacgctctgtgcgtgctgccccccctgttccacggtcccctggctcgtgaaaacctgttgaccctgggccagtgggagctggtgctgccctggatcgtgcccatgcccctggctctggaaatcaaccagcgcctgctgatcatgggcctgttctccctggaccgttcctacgaagaagtgaaggctgctgtccagcagctgcagaccatcaccttccgtgacgctaccttcaccatccccgaccccgtgatcgaccagcacctcctgatcgacatgaagaccgcttgcctgtccatgtccatggtggctaacctggcttccgagctgaccatgacctacgtccgcaagctggctttggaggactcttccatgctgctggtcaagtgccaagagctgctgatgcgtctggaccgcgagcgttccgtgggcgagcctcgtactcccgctcgtcctcagcacgtgtcccccgacgacgagatcgctcgtctgtccgctctgttcgtgatgctgcgtcagctggacgacctgatccgcgagcaggtcgtgttcaccgtgtgcgacgtgagcccagacaacaagtccgctacctgcatcttcaagggctaaggcgcgccaagcttgtcgagaagtactagaggatcataatcagccataccacatttgtagaggttttacttgctttaaaaaacctcccacacctccccctgaacctgaaacataaaatgaatgcaattgttgttgttaacttgtttattgcagcttataatggttacaaataaagcaatagcatcacaaatttcacaaataaagcatttttttcactgcattctagttgtggtttgtccaaactcatcaatgtatcttatcatgtctggatctgatcactgcttgagcctagaagatccggctgctaacaaagcccgaaaggaagctgagttggctgctgccaccgctgagcaataactatcataacccccggaatattaatagatcatggagataattaaaatgataaccatctcgcaaataaataagtattttactgttttcgtaacagttttgtaataaaaaaacctataaatattccggattattcataccgtcccaccatcgggcgcggatcccggtccgaagcgcgcggaattcaaaggcctgccaccatggaaatgaacaaggtgctgcatcaggatctggtgcaggctacccgtcgtatcctgaagctgggcccctccgagctgcgtgtgaccgacgctggcctgatctgcaagaaccccaactactccgtgtgcgacgctatgctcaagaccgacaccgtgtactgcgtcgagtacctgctgtcctactgggagtcccgtaccgaccacgtgccctgcttcatcttcaagaacaccggttgcgctgtgtccctgtgctgcttcgtgcgtgctcccgtgaagctggtgtcccctgctcgtcacgtgggcgagttcaacgtgctgaaggtcaacgagtccctgatcgtgaccctgaaggacatcgaggaaatcaagccctccgcttacggtgtcctgactaagtgcgtcgtccgcaagtccaactccgcttccgtgttcaacatcgagctgatcgctttcggtcccgagaacgagggcgagtacgagaacctgctgcgcgagctgtacgctaagaaggctgcttccacctccctggctgtgcgtaaccacgtgaccgtgtcctcccactccggttccggtccctccctgtggcgtgctcgtatgtccgctgctctgacccgtaccgctggcaagcgctcctccaggactgctagccctccaccaccacctcctcgtcaccctagctgctctcccactatggtggctgctggtggagctgctgctggtcctagacctccccctcctcctatggctgctggatcctggcgtctgtgccgttgcgaggcttgcatgggccgttgcggttgcgcttccgagggcgacgctgacgaggaagaggaagagttgctggctctggctggcgagggcaaggctgctgctgccgctgccggtcaagacgtcggtggttccgctcgtcgtcccctcgaggaacacgtgtcccgtcgtcgtggtgtctccacccaccaccgtcaccccccttccccaccttgcgctccctccctggaacgtaccggttaccgttgggctccttcctcctggtggcgcgctcgttctggtccttcccgtccccagtccggtccctggctgcctgctcgtttcgctaccctgggtcccctggtcctggctctgctgttggtgctggccctgctgtggcgtggtcacggtcaatcccccagccccacccgttccgctcaccgtgactaaaagcttgtcgagaagtactagaggatcataatcagccataccacatttgtagaggttttacttgctttaaaaaacctcccacacctccccctgaacctgaaacataaaatgaatgcaattgttgttgttaacttgtttattgcagcttataatggttacaaataaagcaatagcatcacaaatttcacaaataaagcatttttttcactgcattctagttgtggtttgtccaaactcatcaatgtatcttatcatgtctggatctgatcactgcttgagcctagaagatccggctgctaacaaagcccgaaaggaagctgagttggctgctgtggctagctttgtttaactttaagaaggagatacatctagaaatattaatagatcatggagataattaaaatgataaccatctcgcaaataaataagtattttactgttttcgtaacagttttgtaataaaaaaacctataaatattccggattattcataccgtcccaccatcgggcgcggatcccggtccgaagcgcgcggaattcaaaggcctacgtcgacgccaccatgtccaacaccgctcccggtcccaccgtggctaacaagcgtgacgagaagcaccgtcacgtggtcaacgtggtgctcgagctgcccaccgagatctccgaggctacccaccccgtgctggctaccatgctgtccaagtacacccgtatgtcctccctgttcaacgacaagtgcgctttcaagctggacctgctgcgtatggtggctgtgtcccgtacccgtcgctaaaagcttgtcgagaagtactagaggatcataatcagccataccacatttgtagaggttttacttgctttaaaaaacctcccacacctccccctgaacctgaaacataaaatgaatgcaattgttgttgttaacttgtttattgcagcttataatggttacaaataaagcaatagcatcacaaatttcacaaataaagcatttttttcactgcattctagttgtggtttgtccaaactcatcaatgtatcttatcatgtctggatctgatcactgcttgagcctagaagatccggctgctaacaaagcccgaaaggaagctgagttggctgctgggtgcctaatgagtgagctaactcacattaattgcccggaatattaatagatcatggagataattaaaatgataaccatctcgcaaataaataagtattttactgttttcgtaacagttttgtaataaaaaaacctataaatattccggattattcataccgtcccaccatcgggcgcggatcccggtccgaagcgcgcggaattcgccaccatggacgctcgtgctgtggctaagcgtccccgtgaccccgctgacgaggacaacgagctggtcaccgctctgaaggctaagcgtgaagtgaacaccatctccgtgcgttacctgtaccacgctgaccaccaggctctgaccgctcgtttcttcgtgcccgagggcctggtcgagttcgaggctcagcccggtgctctgctgatccgtatggaaaccggttgcgactccccccgtcacctgtacatctccctgtacctgctgggtatccgtgcttccaacgtgtccgcttccacccgttgcctgctcgagtccgtgtacaccgcttccgctgctcgtgctgctctgcagtggctggacctgggtccccacctcctgcaccgtcgtctggaaaccctgggttgcgtcaagaccgtgtccctgggtatcacctccctgctgacctgcgtgatgcgcggctacctgtacaacaccctcaagaccgaggtgttcgctctgatgatccccaaggacatgtacctgacctgggaggaaacccgcggtcgtctgcagtacgtgtacctgatcatcgtgtacgactacgacggtcccgagactcgtcccggtatctacgtgctgacctcctctatcgctcactggcagaccctggtggacgtggcccgtggaaagttcgctcgtgaacgctgctccttcgtgaaccgtcgtatcacccgtccccgtcagatccccctgtgcaccggtgtcatccaaaagctgggctggtgcctggctgacgacatccacacctcattcctcgtgcacaaggaactgaagctgtccgtcgtgcgtctggacaacttctccgtcgagctgggcgacttccgcgagttcgtgtaaaagcttgtcgagaagtactagaggatcataatcagccataccacatttgtagaggttttacttgctttaaaaaacctcccacacctccccctgaacctgaaacataaaatgaatgcaattgttgttgttaacttgtttattgcagcttataatggttacaaataaagcaatagcatcacaaatttcacaaataaagcatttttttcactgcattctagttgtggtttgtccaaactcatcaatgtatcttatcatgtctggatctgatcactgcttgagcctagaagatccggctgctaacaaagcccgaaaggaagctgagttggctgctgccaccgctgagcaataactatcataacccctaggagatccgaaccagataagtgaaatctagttccaaactattttgtcatttttaattttcgtattagcttacgacgctacacccagttcccatctattttgtcactcttccctaaataatccttaaaaactccatttccacccctcccagttcccaactattttgtccgcccaca

SEQ ID NO: 5 - DNA, 20067 bp, Artificial Sequence
  Synthetic construct
ttgttccagtttggaacaagagtccactattaaagaacgtggactccaacgtcaaagggcgaaaaaccgtctatcagggcgatggcccactacgtgaaccatcaccctaatcaagttttttggggtcgaggtgccgtaaagcactaaatcggaaccctaaagggagcccccgatttagagcttgacggggaaagccggcgaacgtggcgagaaaggaagggaagaaagcgaaaggagcgggcgctagggcgctggcaagtgtagcggtcacgctgcgcgtaaccaccacacccgccgcgcttaatgcgccgctacagggcgcgtcgcgccattcgccattcaggctgcgcaactgttgggaagggcgatcggtgcgggcctcttcgctattacgccagctggcgaaagggggatgtgctgcaaggcgattaagttgggtaacgccagggttttcccagtcacgacgttgtaaaacgacggccagtgcatagaccagccgcgtaacctggcaaaatcggttacggttgagtaataaatggatgccctgcgtaagcgggtgtgggcggacaataaagtcttaaactgaacaaaatagatctaaactatgacaataaagtcttaaactagacagaatagttgtaaactgaaatcagtccagttatgctgtgaaaaagcatactggacttttgttatggctaaagcaaactcttcattttctgaagtgcaaattgcccgtcgtattaaagaggggcgtggccaagggcatggtaaagactatattcgcggcgttgtgacaatttaccgaacaactccgcggccgggaagccgatctcggcttgaacgaattgttaggtggcggtacttgggtcgatatcaaagtgcatcacttcttcccgtatgcccaactttgtatagagagccactgcgggatcgtcaccgtaatctgcttgcacgtagatcacataagcaccaagcgcgttggcctcatgcttgaggagattgatgagcgcggtggcaatgccctgcctccggtgctcgccggagactgcgagatcatagatatagatctcactacgcggctgctcaaacttgggcagaacgtaagccgcgagagcgccaacaaccgcttcttggtcgaaggcagcaagcgcgatgaatgtcttactacggagcaagttcccgaggtaatcggagtccggctgatgttgggagtaggtggctacgtctccgaactcacgaccgaaaagatcaagagcagcccgcatggatttgacttggtcagggccgagcctacatgtgcgaatgatgcccatacttgagccacctaactttgttttagggcgactgccctgctgcgtaacatcgttgctgctgcgtaacatcgttgctgctccataacatcaaacatcgacccacggcgtaacgcgcttgctgcttggatgcccgaggcatagactgtacaaaaaaacagtcataacaagccatgaaaaccgccactgcgccgttaccaccgctgcgttcggtcaaggttctggaccagttgcgtgagcgcatacgctacttgcattacagtttacgaaccgaacaggcttatgtcaactgggttcgtgccttcatccgtttccacggtgtgcgtcacccggcaaccttgggcagcagcgaagtcgaggcatttctgtcctggctggcgaacgagcgcaaggtttcggtctccacgcatcgtcaggcattggcggccttgctgttcttctacggcaaggtgctgtgcacggatctgcccttgcttcaggagatcggtagacctcggccgtcgcggcgcttgccggtggtgctgaccccggatgaagtggttcgcatcctcggttttctggaaggcgagcatcgtttgttcgcccaggactctagctatagttctagtggttggctacagctttgtttgtactatcaacaggttgaactgctgatcaacagatcctctacgcggccgcggtaccataacttcgtatagcatcacattatacgaagttatctggtttaaacgtacccgtagtggctatggcagggcttgccgccccgacgttggctgcgagccctgggccttcacccgaacttgggggttggggtggggaaaaggaagaaacgcgggcgtattggtcccaatggggtctcggtggggtatcgacagagtgccagccctgggaccgaaccccgcgtttatgaacaaacgacccaacacccgtgcgttttattctgtctttttattgccgtcatagcgcgggttccttccggtattgtctccttccgtgtttcagttagcctcccccatctcccggtaccgcatgctatgcatcagctgctagcaccatggctcgagatcccgggtgatcaagtcttcgtcgagtgattgtaaataaaatgtaatttacagtatagtattttaattaatatacaaatgatttgataataattcttatttaactataatatattgtgttgggttgaattaaaggtccgtatactagtatcgattcgcgacctactccggaatattaatagatcatggagataattaaaatgataaccatctcgcaaataaataagtattttactgttttcgtaacagttttgtaataaaaaaacctataaatattccggattattcataccgtcccaccatcgggcgcggatcccggtccgaagcgcgcggaattcaaaggcctaccgtcgacgccaccatggaatcccgtggtcgtcgttgccccgagatgatctccgtgctgggtcccatctccggtcacgtcctgaaggctgtgttctcccgtggcgacacccccgtgctgccccacgaaactcgtctgctgcagaccggtatccacgtgcgtgtgtcccagccctccctgatcctggtgtcccagtacacccccgactccaccccttgccaccgcggagacaaccagctgcaggtccagcacacctacttcaccggttccgaggtcgagaacgtgtccgtgaacgtgcacaaccccaccggtcgttccatctgcccctcccaagagcccatgtccatctacgtgtacgctctgcccctgaagatgctgaacatcccctccatcaacgtgcaccactacccctccgctgctgagcgcaagcaccgtcacctccccgtggctgacgctgtgatccacgcttccggcaagcagatgtggcaggctcgtctgaccgtgtccggcctggcttggacccgtcagcagaaccagtggaaggaacccgacgtgtactacacctccgctttcgtgttccccaccaaggacgtggccctgcgtcacgtcgtgtgcgctcacgaactcgtgtgctccatggaaaacacccgtgctaccaagatgcaagtgatcggcgaccagtacgtgaaggtgtacctggaatccttctgcgaggacgtgccctccggcaagctgttcatgcacgtgaccctgggttccgacgtggaagaggacctgaccatgacccgtaacccccagcccttcatgcgtccccacgagcgtaacggtttcaccgtgctgtgccccaagaacatgatcatcaagcccggcaagatctcccacatcatgctggacgtggccttcacctcccacgagcacttcggcctgctgtgccctaagtccatccccggcctgtccatctccggcaacctgctgatgaacggccagcagatcttcctggaagtgcaggctatccgtgaaaccgtcgagctgcgtcagtacgaccctgtggctgctctgttcttcttcgacatcgacctgctgctgcagcgtggtccccagtactccgagcaccccaccttcaccagccagtaccgtatccagggcaagctggaataccgtcacacctgggaccgtcacgacgagggtgctgctcagggcgacgacgacgtgtggacctccggttccgactccgacgaggaactggtcaccaccgagcgcaagaccccccgtgtgaccggtggtggtgctatggctggtgcttccacctccgctggtcgcaagcgcaagtccgcttcctccgctaccgcttgcaccgctggtgtcatgacccgtggtcgcctgaaggctgagtccaccgtggctcccgaagaggacactgacgaggactccgacaacgagatccacaaccccgctgtgttcacctggcccccctggcaggctggtatcctggctcgtaacctggtgcccatggtggctaccgtgcagggccagaacctgaagtaccaagagttcttctgggacgccaacgacatctaccgtatcttcgctgagctggaaggcgtgtggcagcccgctgctcagcccaagcgtcgtcgtcaccgtcaggacgctctgcctggtccctgtatcgcttccacccccaagaagcaccgcggctaaaagcttgtcgagaagtactagaggatcataatcagccataccacatttgtagaggttttacttgctttaaaaaacctcccacacctccccctgaacctgaaacataaaatgaatgcaattgttgttgttaacttgtttattgcagcttataatggttacaaataaagcaatagcatcacaaatttcacaaataaagcatttttttcactgcattctagttgtggtttgtccaaactcatcaatgtatcttatcatgtctggatctgatcactgcttgagcctagaagatccggctgctaacaaagcccgaaaggaagctgagttggctgctgtggctagctttgtttaactttaagaaggagatacatctagacctgcaggccggaatattaatagatcatggagataattaaaatgataaccatctcgcaaataaataagtattttactgttttcgtaacagttttgtaataaaaaaacctataaatattccggattattcataccgtcccaccatcgggcgcggatcccggtccgaagcgcgcggaattcgccaccatgaccatggacgagcagcagccccaggctgtgacccccgtgtacgtgggcggtttcctggctcgttacgaccagtcccccgacgaggctgagctgctgctgccacgtgacgtggtcgaacactggctgcacgctcagggccagggacagccttccctgtccgtggctctgcccctgaacatcaaccacgacgacaccgctgtcgtgggtcacgtggccgctatgcagtccgtgcgtgacggcctgttctgcctgggttgcgtgacctccccccgtttcctggaaatcgtgcgtcgtgcttccgagaagtccgagctggtgtcccgtggtcccgtgtccccactgcagcccgacaaggtggtcgagttcctgtccggttcctacgctggcctgtccctgtcatcccgtcgttgcgacgacgtcgaggctgctacctccctgagcggctccgagactacccccttcaagcacgtggccctgtgctccgtgggtcgtaggcgtggaaccctggctgtgtacggtcgtgaccccgagtgggtcacccagcgtttccccgacctgaccgctgctgaccgtgacggactgcgtgctcagtggcagcgttgcggttccaccgctgtggacgcttccggcgaccccttccgttccgactcctacggcctgctgggcaactccgtggacgctctgtacatccgcgagcgtctgcccaagctgcgttacgacaagcagctcgtgggtgtcaccgagcgcgagtcctacgtgaaggcttccgtgtcccccgaggctgcttgcgacatcaaggctgcttccgctgagcgttctggcgacagccgctcccaggctgctactcctgctgctggtgctcgtgtgccctccagctccccatccccacctgtcgagcctccctcccccgtgcaacctcctgctctgcctgcttccccctccgtgctgcctgctgagtccagcccctccctgtcaccctctgagcctgctgaggctgcctccatgtcccaccctctgagcgctgctgtgactgctgctaccgctccccctggtgctactgtggctggtgcttcccccgctgtgccttccctggcttggcctcacgacggtgtctacctgcccaaggacgctttcttctccctgctgggcgcttcccgttccgctgctcccgtgatgtaccccggtgctgtggctgctccccccagcgcttcacctgctcctctgcccctgccctcctaccccgcttcctacggtgctcccgtcgtgggttacgaccagctggctgctcgtcacttcgctgactacgtggacccccactaccccggctggggtcgtcgttacgagcccgctccttccctgcacccatcctaccctgtgccccctcctccatcacccgcttactaccgtcgtcgtgactcccccggtggcatggacgagcctccatctggatgggagcgttacgacggttcccaccgtggccagtcccaaaagcagcaccgtcacggtggttccggtggtcacaacaagcgtcgcaaggaagccgctgctgcatcctccagctccgacgaggacctgagcttccccggcgaggctgaacacggtcgtgctcgcaagcgtctgaagtcccacgtgaactccgacggaggtagcggaggccacgctggttccaaccagcagcagcaacagcgctacgacgagctgcgtgacgctatccacgagctgaagcgtgacctgttcgctgctcgccagtcctccaccctgctgtctgctgctctgccagctgccgcttcttcctcccctaccaccaccaccgtgtgcacccctactggcgagctgacctctggtggtggcgagactcccaccgctctgctgtccggtggtgctaaggtggccgagcgtgctcaggctggtgtcgtgaacgcttcctgccgtctggctaccgcttccggttccgaggctgccaccgctggtccctctaccgctggttcctcatcctgcccagcttccgtggtgctggctgccgctgctgctcaagccgccgctgcttcacagtcccccccaaaggatatggtggacctgaaccgtcgtatcttcgtggctgctctgaacaagctcgagtaataaaagcttgtcgagaagtactagaggatcataatcagccataccacatttgtagaggttttacttgctttaaaaaacctcccacacctccccctgaacctgaaacataaaatgaatgcaattgttgttgttaacttgtttattgcagcttataatggttacaaataaagcaatagcatcacaaatttcacaaataaagcatttttttcactgcattctagttgtggtttgtccaaactcatcaatgtatcttatcatgtctggatctgatcactgcttgagcctagaagatccggctgctaacaaagcccgaaaggaagctgagttggctgctgccaccgctgagcaataactatcataacccctaggggcctctaaacgggtcttgaggggttttttgctgaaaggaggaactatatccggatctgaacaggagggacagctgatagaaacagaagccactggagcacctcaaaaacaccatcatacactaaatcagtaagttggcagcatcacccgacgcactttgcgccgaataaatacctgtgacggaagatcacttcgcagaataaataaatcctggtgtccctgttgataccgggaagccctgggccaacttttggcgaaaatgagacgttgatcggcacgtaagaggttccaactttcaccataatgaaataagatcactaccgggcgtattttttgagttatcgagattttcaggagctaaggaagctaaaatggagaaaaaaatcactggatataccaccgttgatatatcccaatggcatcgtaaagaacattttgaggcatttcagtcagttgctcaatgtacctataaccagaccgttcagctggatattacggcctttttaaagaccgtaaagaaaaataagcacaagttttatccggcctttattcacattcttgcccgcctgatgaatgctcatccggaattccgtatggcaatgaaagacggtgagctggtgatatgggatagtgttcacccttgttacaccgttttccatgagcaaactgaaacgttttcatcgctctggagtgaataccacgacgatttccggcagtttctacacatatattcgcaagatgtggcgtgttacggtgaaaacctggcctatttccctaaagggtttattgagaatatgtttttcgtctcagccaatccctgggtgagtttcaccagttttgatttaaacgtggccaatatggacaacttcttcgcccccgttttcaccatgggcaaatattatacgcaaggcgacaaggtgctgatgccgctggcgattcaggttcatcatgccgtttgtgatggcttccatgtcggcagaatgcttaatgaattacaacagtactgcgatgagtggcagggcggggcgtaatttttttaaggcagttattggtgcccttaaacgcctggttgctacgcctgaataagtgataataagcggatgaatggcagaaattcgaaagcaaattcgacccggtcgtcggttcagggcagggtcgttaaatagccgcttatgtctattgctggtttaccggtttattgactaccggaagcagtgtgaccgtgtgcttctcaaatgcctgaggccagtttgctcaggctctccccgtggaggtaataattgacgatatgatcatttattctgcctcccagctgacattcatccggggtcagcaccgtttctgcggactggctttctacgtgttccgcttcctttagcagcccttgcgccctgagtgcttgcggcagcgtgaagctaattctgtcagccgttaagtgttcctgtgtcactcaaaattgctttgagaggctctaagggcttctcagtgcgttacatccctggcttgttgtccacaaccgttaaaccttaaaagctttaaaagccttatatattcttttttttcttataaaacttaaaaccttagaggctatttaagttgctgatttatattaattttattgttcaaacatgagagcttagtacgtgaaacatgagagcttagtacgttagccatgagagcttagtacgttagccatgagggtttagttcgttaaacatgagagcttagtacgttaaacatgagagcttagtacgtgaaacatgagagcttagtacgtactatcaacaggttgaactgctgatcaacagatcctctacgcggccgcggtaccataacttcgtatagcatacattatacgaagttatctggtttaaacgtacccgtagtggctatggcagggcttgccgccccgacgttggctgcgagccctgggccttcacccgaacttgggggttggggtggggaaaaggaagaaacgcgggcgtattggtcccaatggggtctcggtggggtatcgacagagtgccagccctgggaccgaaccccgcgtttatgaacaaacgacccaacacccgtgcgttttattctgtctttttattgccgtcatagcgcgggttccttccggtattgtctccttccgtgtttcagttagcctcccccatctcccggtaccgcatgctatgcatcagctgctagcaccatggctcgagatcccgggtgatcaagtcttccgtcgagtgattgtaaataaaatgtaatttacagtatagtattttaattaatatacaaatgatttgataataattcttatttaactataatatattgtgttgggttgaattaaaggtccgtatactagtatcgattcgcgacctactccggaatattaatagatcatggagataattaaaatgataaccatctcgcaaataaataagtattttactgttttcgtaacagttttgtaataaaaaaacctataaatattccggattattcataccgtcccaccatcgggcgcggatccgccaccatggaaaactggtccgctctggaactgctgcccaaggtcggaatccctaccgacttcctgacccacgtcaagacctccgctggcgaggaaatgttcgaggctctgaggatctactacggcgacgaccccgagcgttacaacatccacttcgaggctatcttcggcaccttctgcaaccgtctggaatgggtgtacttcctgacttccggcctggctgctgctgctcacgctatcaagttccacgacctgaacaagctgaccaccggcaagatgctgttccacgtgcaagtgccccgtgtggcttccggtgctggcctgcctacctcccgtcagaccaccatcatggtcaccaagtactccgagaagtcccccatcaccatccctttcgagctgtccgctgcttgcctgacttacctgcgtgaaaccttcgagggcaccatcctggacaagatcctgaacgtcgaggctatgcacaccgtgctgcgtgctctgaagaacaccgctgacgctatggaacgtggcctgatccacagcttcctccagaccctgctgaggaaggctcccccctacttcgtggtgcagaccctggtcgagaacgctaccctggctcgtcaggctctgaaccgtatccagcgctccaacatcctgcagtccttcaaggctaagatgctggctaccctgttcctgctgaaccgtacccgtgaccgtgactacgtgctgaagttcctgacccgtctggctgaggctgctaccgactccatcctcgacaaccctactacctacaccacctcctccggtgctaagatctccggtgtcatggtgtccaccgctaacgtgatgcagatcatcatgtccctgctgtcctcccacatcactaaggaaaccgtgtccgctcccgctacctacggcaacttcgtgctgtcccccgagaacgctgtgaccgctatctcctaccactctatcctggctgacttcaactcctacaaggctcacctgacctccggccagccccacctccccaacgactccctgagccaggctggtgctcactccctgacccccctgtccatggacgtgatccgtctgggcgaaaagaccgtgatcatggaaaacctgcgtcgcgtgtacaagaacaccgacaccaaggaccccctggaacgtaacgtggacctgaccttcttcttccccgtgggcctgtacctgcccgaggaccgtggttacaccaccgtcgagtccaaggtcaagctgaacgacaccgtgcgtaacgctctgcccaccaccgcttacctgctgaacagggaccgtgctgtgcaaaagatcgacttcgtggacgctctcaagaccctgtgccaccccgtgctgcacgagcctgctccatgcctgcaggctttcaccgagcgtggtcccccatccgagcccgctatgcagcgtctgctggaatgccgtttccagcaagagcccatgggtggtgctgctcgtcgtatcccccacttctaccgtgtgcgccgcgaggtgccccgtaccgtgaacgagatgaagcaggacttcgtggtcaccgacttctacaaggttggaaacatcaccctgtacaccgagctgcaccctttcttcgacttcacccactgccaagagaactccgagactgtggctctgtgcaccccccgtatcgtgatcggcaacctgcccgacggcctggctcccggtcccttccacgagctgaggacctgggagatcatggaacacatgcgcctgcgtcccccacccgactacgaggaaaccctgcgtctgttcaagaccaccgtgacctcccccaactaccccgagctgtgctacctggtggacgtgctggtgcacggcaacgctgacgctttcctgctgatccgcgctttcatcgctcgttgcatcgtgaacatgttccacacccgtcagctgctggtgttcgctcactcctacgctctggtcaccctgatcgctgagcacctggctgacggtgctctgcccccccagctcctgttccactaccgtaacctggtggctgtgctgcgcctggtcacccgtatctccgctctgcccggcctgaacaacggccagctggctgaggaacccctgtccgcttacgtgaacgctctgcacgaccacaggctgtggccccccttcgtgacccacctccctcgtaacatggaaggtgtccaggtggtggctgatcgtcagcccctgaaccccgctaacatcgaggctcgtcaccacggtgtctccgacgtgccccgtctgggtgctatggacgctgacgagcccctgttcgtggacgactaccgtgctaccgacgacgagtggaccctgcaaaaggtgttctacctgtgcctgatccccgctatgaccaacaaccgtgcttgcggcctgggcctgaacctcaagactctgctggtggacctgttctaccgtcccgccttcctgctcatgcccgctgctaccgctgtgtccacctccggcaccacctccaaggaatccacctctggtgtcacccccgaggactccgtggctgctcagcgtcaggctgtgggcgagatgctgaccgagctggtcgaggacgtggccaccgacgctcacacccctctgctgcaggcttgccgcgagctgttcctggctgtgcagttcgtgggcgagcacgtgaaggtgctggaagtgcgtgctcccctggaccacgctcagaggcagggactgcccgacttcatctcccgtcagcatgtgctgtacaacggttgctgcgtcgtgaccgctcctaagaccctgatcgagtactccctgcccgtgcccttccaccgtttctactccaaccccaccatctgcgctgctctgtccgacgacatcaagcgttacgtgaccgagttcccccactaccatagacacgatggtggtttccccctgcccaccgctttcgctcacgagtaccacaactggctgcgtagccccttctcccgttactccgctacctgccccaacgtgctgcactccgtgatgaccctggctgctatgctgtacaagatctcccccgtgtccctggtgctgcagaccaaggctcacatccaccccggtttcgctctgaccgctgtgcgtaccgacaccttcgaggtggacatgctgctgtactccggcaagtcctgcacctccgtcatcatcaacaaccccatcgtgaccaaggaagagagggacatctccaccacctaccacgtgacccagaacatcaacaccgtggacatgggcctgggttacacctccaacacttgcgtggcctacgtgaaccgcgtccgcaccgacatgggtgtccgtgtgcaggacctgttccgtgtgttccccatgaacgtgtaccgccacgatgaggtggaccgttggatcaggcacgctgctggcgtcgagcgtccccagctgctggacaccgagactatctccatgctgaccttcggttccatgtccgagcgcaacgctgctgctaccgtgcacggccagaaggctgtctgcgagctgatcctgacccctgtgactatggacgtgaactacttcaagatcaccaacaaccctcgtggtcgtgcttcctgcatgctgggcgtggacccctacgacaccgaggctgccaccaaggctatctacgaccaccgcgaggctgacgctcagaccttcgctgctacccacaacccatgggcttcccaggctggttgcctgtccgacgtcctgtacaacacccgtcaccgcgagcgtctgggctacaactccaagttctactccccctgcgctcagtacttcaacaccgaggaaatcatcgctgccaacaagaccctcttcaagaccatcgacgagtacctgctgcgcgctaaggactgcatccgtggcgacaccgacactcagtacgtgtgcgtcgagggaaccgagcagctgatcgagaacccttgccgtctgacccaagaggctctgcccatcctgtccaccaccaccctggctctgatggaaactaagctgaagggtggcgctggtgctttcgctacctccgagactcacttcggcaactacgtcgtgggagagatcatccccctgcagcagtccatgctgttcaacagctaagagctcaagcttgtcgagaagtactagaggatcataatcagccataccacatttgtagaggttttacttgctttaaaaaacctcccacacctccccctgaacctgaaacataaaatgaatgcaattgttgttgttaacttgtttattgcagcttataatggttacaaataaagcaatagcatcacaaatttcacaaataaagcatttttttcactgcattctagttgtggtttgtccaaactcatcaatgtatcttatcatgtctggatctgatcactgcttgagcctagaagatccggctgctaacaaagcccgaaaggaagctgagttggctgctgcccaccgctgagcaataactatcataacccccggaatattaatagatcatggagataattaaaatgataaccatctcgcaaataaataagtattttactgttttcgtaacagttttgtaataaaaaaacctataaatattccggattattcataccgtcccaccatcgggcgcggatccgccaccatggctgctatggaagctaacatcttctgcaccttcgaccacaagctgtctatcgctgacgtgggcaagctgaccaagctggtggctgctgtggtgcccatcccccagcgtctgcacctgatcaagcactaccagctgggcctgcaccagttcgtggaccacacccgtggttacgtgcgtctgcgtggcctgctgcgtaacatgaccctgaccctgatgcgtcgtgtcgagggcaaccagatcctgctgcacgtgcccacccacggcctgctgtacaccgtgctgaacaccggtcccgtgacctgggagaagggcgacgctctgtgcgtgctgccccccctgttccacggtcccctggctcgtgaaaacctgttgaccctgggccagtgggagctggtgctgccctggatcgtgcccatgcccctggctctggaaatcaaccagcgcctgctgatcatgggcctgttctccctggaccgttcctacgaagaagtgaaggctgctgtccagcagctgcagaccatcaccttccgtgacgctaccttcaccatccccgaccccgtgatcgaccagcacctcctgatcgacatgaagaccgcttgcctgtccatgtccatggtggctaacctggcttccgagctgaccatgacctacgtccgcaagctggctttggaggactcttccatgctgctggtcaagtgccaagagctgctgatgcgtctggaccgcgagcgttccgtgggcgagcctcgtactcccgctcgtcctcagcacgtgtcccccgacgacgagatcgctcgtctgtccgctctgttcgtgatgctgcgtcagctggacgacctgatccgcgagcaggtcgtgttcaccgtgtgcgacgtgagcccagacaacaagtccgctacctgcatcttcaagggctaaggcgcgccaagcttgtcgagaagtactagaggatcataatcagccataccacatttgtagaggttttacttgctttaaaaaacctcccacacctccccctgaacctgaaacataaaatgaatgcaattgttgttgttaacttgtttattgcagcttataatggttacaaataaagcaatagcatcacaaatttcacaaataaagcatttttttcactgcattctagttgtggtttgtccaaactcatcaatgtatcttatcatgtctggatctgatcactgcttgagcctagaagatccggctgctaacaaagcccgaaaggaagctgagttggctgctgcccaccgctgagcaataactatcataacccccggaatattaatagatcatggagataattaaaatgataaccatctcgcaaataaataagtattttactgttttcgtaacagttttgtaataaaaaaacctataaatattccggattattcataccgtcccaccatcgggcgcggatccggtccgaagcgcgcggaattcaaaggcctacgtcgacgccaccatggaaatgaacaaggtgctgcatcaggatctggtgcaggctacccgtcgtatcctgaagctgggcccctccgagctgcgtgtgaccgacgctggcctgatctgcaagaaccccaactactccgtgtgcgacgctatgctcaagaccgacaccgtgtactgcgtcgagtacctgctgtcctactgggagtcccgtaccgaccacgtgccctgcttcatcttcaagaacaccggttgcgctgtgtccctgtgctgcttcgtgcgtgctcccgtgaagctggtgtcccctgctcgtcacgtgggcgagttcaacgtgctgaaggtcaacgagtccctgatcgtgaccctgaaggacatcgaggaaatcaagccctccgcttacggtgtcctgactaagtgcgtcgtccgcaagtccaactccgcttccgtgttcaacatcgagctgatcgctttcggtcccgagaacgagggcgagtacgagaacctgctgcgcgagctgtacgctaagaaggctgcttccacctccctggctgtgcgtaaccacgtgaccgtgtcctcccactccggttccggtccctccctgtggcgtgctcgtatgtccgctgctctgacccgtaccgctggcaagcgctcctccaggactgctagccctccaccaccacctcctcgtcaccctagctgctctcccactatggtggctgctggtggagctgctgctggtcctagacctccccctcctcctatggctgctggatcctggcgtctgtgccgttgcgaggcttgcatgggccgttgcggttgcgcttccgagggcgacgctgacgaggaagaggaagagttgctggctctggctggcgagggcaaggctgctgctgccgctgccggtcaagacgtcggtggttccgctcgtcgtcccctcgaggaacacgtgtcccgtcgtcgtggtgtctccacccaccaccgtcaccccccttccccaccttgcgctccctccctggaacgtaccggttaccgttgggctccttcctcctggtggcgcgctcgttctggtccttcccgtccccagtccggtccctggctgcctgctcgtttcgctaccctgggtcccctggtcctggctctgctgttggtgctggccctgctgtggcgtggtcacggtcaatcccccagccccacccgttccgctcaccgtgactaaaagcttgtcgagaagtactagaggatcataatcagccataccacatttgtagaggttttacttgctttaaaaaacctcccacacctccccctgaacctgaaacataaaatgaatgcaattgttgttgttaacttgtttattgcagcttataatggttacaaataaagcaatagcatcacaaatttcacaaataaagcatttttttcactgcattctagttgtggtttgtccaaactcatcaatgtatcttatcatgtctggatctgatcactgcttgagcctagaagatccggctgctaacaaagcccgaaaggaagctgagttggctgctgtggctagctttgtttaactttaagaaggagatacatctagaaatattaatagatcatggagataattaaaatgataaccatctcgcaaataaataagtattttactgttttcgtaacagttttgtaataaaaaaacctataaatattccggattattcataccgtcccaccatcgggcgcggatcccggtccgaagcgcgcggaattcaaaggcctacgtcgacgccaccatgtccaacaccgctcccggtcccaccgtggctaacaagcgtgacgagaagcaccgtcacgtggtcaacgtggtgctcgagctgcccaccgagatctccgaggctacccaccccgtgctggctaccatgctgtccaagtacacccgtatgtcctccctgttcaacgacaagtgcgctttcaagctggacctgctgcgtatggtggctgtgtcccgtacccgtcgctaaaagcttgtcgagaagtactagaggatcataatcagccataccacatttgtagaggttttacttgctttaaaaaacctcccacacctccccctgaacctgaaacataaaatgaatgcaattgttgttgttaacttgtttattgcagcttataatggttacaaataaagcaatagcatcacaaatttcacaaataaagcatttttttcactgcattctagttgtggtttgtccaaactcatcaatgtatcttatcatgtctggatctgatcactgcttgagcctagaagatccggctgctaacaaagcccgaaaggaagctgagttggctgctgggtgcctaatgagtgagctaactcacattaattgcccggaatattaatagatcatggagataattaaaatgataaccatctcgcaaataaataagtattttactgttttcgtaacagttttgtaataaaaaaacctataaatattccggattattcataccgtcccaccatcgggcgcggatcccggtccgaagcgcgcggaattcgccaccatggacgctcgtgctgtggctaagcgtccccgtgaccccgctgacgaggacaacgagctggtcaccgctctgaaggctaagcgtgaagtgaacaccatctccgtgcgttacctgtaccacgctgaccaccaggctctgaccgctcgtttcttcgtgcccgagggcctggtcgagttcgaggctcagcccggtgctctgctgatccgtatggaaaccggttgcgactccccccgtcacctgtacatctccctgtacctgctgggtatccgtgcttccaacgtgtccgcttccacccgttgcctgctcgagtccgtgtacaccgcttccgctgctcgtgctgctctgcagtggctggacctgggtccccacctcctgcaccgtcgtctggaaaccctgggttgcgtcaagaccgtgtccctgggtatcacctccctgctgacctgcgtgatgcgcggctacctgtacaacaccctcaagaccgaggtgttcgctctgatgatccccaaggacatgtacctgacctgggaggaaacccgcggtcgtctgcagtacgtgtacctgatcatcgtgtacgactacgacggtcccgagactcgtcccggtatctacgtgctgacctcctctatcgctcactggcagaccctggtggacgtggcccgtggaaagttcgctcgtgaacgctgctccttcgtgaaccgtcgtatcacccgtccccgtcagatccccctgtgcaccggtgtcatccaaaagctgggctggtgcctggctgacgacatccacacctcattcctcgtgcacaaggaactgaagctgtccgtcgtgcgtctggacaacttctccgtcgagctgggcgacttccgcgagttcgtgtaaaagcttgtcgagaagtactagaggatcataatcagccataccacatttgtagaggttttacttgctttaaaaaacctcccacacctccccctgaacctgaaacataaaatgaatgcaattgttgttgttaacttgtttattgcagcttataatggttacaaataaagcaatagcatcacaaatttcacaaataaagcatttttttcactgcattctagttgtggtttgtccaaactcatcaatgtatcttatcatgtctggatctgatcactgcttgagcctagaagatccggctgctaacaaagcccgaaaggaagctgagttggctgctgccaccgctgagcaataactatcataacccctaggagatccgaaccagataagtgaaatctagttccaaactattttgtcatttttaattttcgtattagcttacgacgctacacccagttcccatctattttgtcactcttccctaaataatccttaaaaactccatttccacccctcccagttcccaactattttgtccgcccaca

SEQ ID NO: 6 - DNA, 14134 bp, Artificial Sequence
  Synthetic construct
ttgttccagtttggaacaagagtccactattaaagaacgtggactccaacgtcaaagggcgaaaaaccgtctatcagggcgatggcccactacgtgaaccatcaccctaatcaagttttttggggtcgaggtgccgtaaagcactaaatcggaaccctaaagggagcccccgatttagagcttgacggggaaagccggcgaacgtggcgagaaaggaagggaagaaagcgaaaggagcgggcgctagggcgctggcaagtgtagcggtcacgctgcgcgtaaccaccacacccgccgcgcttaatgcgccgctacagggcgcgtcgcgccattcgccattcaggctgcgcaactgttgggaagggcgatcggtgcgggcctcttcgctattacgccagctggcgaaagggggatgtgctgcaaggcgattaagttgggtaacgccagggttttcccagtcacgacgttgtaaaacgacggccagtgcatagaccagccgcgtaacctggcaaaatcggttacggttgagtaataaatggatgccctgcgtaagcgggtgtgggcggacaataaagtcttaaactgaacaaaatagatctaaactatgacaataaagtcttaaactagacagaatagttgtaaactgaaatcagtccagttatgctgtgaaaaagcatactggacttttgttatggctaaagcaaactcttcattttctgaagtgcaaattgcccgtcgtattaaagaggggcgtggccaagggcatggtaaagactatattcgcggcgttgtgacaatttaccgaacaactccgcggccgggaagccgatctcggcttgaacgaattgttaggtggcggtacttgggtcgatatcaaagtgcatcacttcttcccgtatgcccaactttgtatagagagccactgcgggatcgtcaccgtaatctgcttgcacgtagatcacataagcaccaagcgcgttggcctcatgcttgaggagattgatgagcgcggtggcaatgccctgcctccggtgctcgccggagactgcgagatcatagatatagatctcactacgcggctgctcaaacttgggcagaacgtaagccgcgagagcgccaacaaccgcttcttggtcgaaggcagcaagcgcgatgaatgtcttactacggagcaagttcccgaggtaatcggagtccggctgatgttgggagtaggtggctacgtctccgaactcacgaccgaaaagatcaagagcagcccgcatggatttgacttggtcagggccgagcctacatgtgcgaatgatgcccatacttgagccacctaactttgttttagggcgactgccctgctgcgtaacatcgttgctgctgcgtaacatcgttgctgctccataacatcaaacatcgacccacggcgtaacgcgcttgctgcttggatgcccgaggcatagactgtacaaaaaaacagtcataacaagccatgaaaaccgccactgcgccgttaccaccgctgcgttcggtcaaggttctggaccagttgcgtgagcgcatacgctacttgcattacagtttacgaaccgaacaggcttatgtcaactgggttcgtgccttcatccgtttccacggtgtgcgtcacccggcaaccttgggcagcagcgaagtcgaggcatttctgtcctggctggcgaacgagcgcaaggtttcggtctccacgcatcgtcaggcattggcggccttgctgttcttctacggcaaggtgctgtgcacggatctgcccttgcttcaggagatcggtagacctcggccgtcgcggcgcttgccggtggtgctgaccccggatgaagtggttcgcatcctcggttttctggaaggcgagcatcgtttgttcgcccaggactctagctatagttctagtggttggctacagctttgtttgtactatcaacaggttgaactgctgatcaacagatcctctacgcggccgcggtaccataacttcgtatagcatacattatacgaagttatctggtttaaacgtacccgtagtggctatggcagggcttgccgccccgacgttggctgcgagccctgggccttcacccgaacttgggggttggggtggggaaaaggaagaaacgcgggcgtattggtcccaatggggtctcggtggggtatcgacagagtgccagccctgggaccgaaccccgcgtttatgaacaaacgacccaacacccgtgcgttttattctgtctttttattgccgtcatagcgcgggttccttccggtattgtctccttccgtgtttcagttagcctcccccatctcccggtaccgcatgctatgcatcagctgctagcttactgcagccaccaccacagggagttcagggtggacaggttcacagcacgacggtgctcagggggggtcaggttgccgtaggtggaggactgcaggctgaagttacggatctcagacaggaacagcagggagtccaggtagtcccacatggggtcgatgaaggtgcgctggaaacgggtggatggggaggtgggggtggtcttgttgttgtcggaagcagtctcgttctcgacgggcatggtgtcgttgtagtacagggaggacatgtccagggtgccgtagatggtgtagggagtctcgttacggatcagcacgtgagtgttcttcatgaactcggacacagcggtacggttacggttgggcttgcagaagggctcgtcacggtaacgcagggtggtgtacacccaggtagccaggtccttcagctgagtggtcaggatagacttcatgaagttctcgtcgggacggtaaccgatggtagaggtggggatacgggtgggcacgatgggggagtaggtcacgttggtggaaacgttgaagatggtggaggtgtaggaggagtagggggtagtagtgctgacgcgggacttcttggagatggacttcacgggagcctgcttgcgcttcagcttgcgcatggtgttcttcagcttggtggagttgatgtacttgggcacacggaagatgttacgggacatagcgttgaccaggtagaaggaacgggtgcagttgcgctgagcgtaacgcagcagcagagcagccaggcccaggaagtagatagtctgggagtccacgttgaccttggaggggcccacgtacagcttggtgttccaacggggcacgttgaagaacatggggttgaaggtggtgaagttgccgcagttttcctcgccggtgttgttacgacgggacacgttcagcatctcggacaggcaggtcatggaggggatggtgccgcaagaggggggacggaaggtgatcttctggccggtgtggttgtactcggagtacacgtacttagcgggcttgcgcagctgggtggtgtggaagtcgaaccacaggtgggtgatggagtggttacggatgggaccagccaggatggagttgggggggaactgcttcatctcgacggtgatgttgtacagcttctgctggctggggaaggtgaagaacttgtagtagtcgccggtcttggaagccagctcttgcaggatacgcagcttcagctggcgttcctcttccttagccttctgggacttcacacggaaacgagccacagcgatcttgcagttgatgaagctgaacagcaggaaggtcagggacatcaggaagaacaggttgaacacgccacgcatctcgcccttgcgacccatggtggcctcgagatcccgggtgatcaagtcttcgtcgagtgattgtaaataaaatgtaatttacagtatagtattttaattaatatacaaatgatttgataataattcttatttaactataatatattgtgttgggttgaattaaaggtccgtatactagtatcgattcgcgacctactccggaatattaatagatcatggagataattaaaatgataaccatctcgcaaataaataagtattttactgttttcgtaacagttttgtaataaaaaaacctataaatattccggattattcataccgtcccaccatcgggcgcggatccgccaccatggaaaactggtccgctctggaactgctgcccaaggtcggaatccctaccgacttcctgacccacgtcaagacctccgctggcgaggaaatgttcgaggctctgaggatctactacggcgacgaccccgagcgttacaacatccacttcgaggctatcttcggcaccttctgcaaccgtctggaatgggtgtacttcctgacttccggcctggctgctgctgctcacgctatcaagttccacgacctgaacaagctgaccaccggcaagatgctgttccacgtgcaagtgccccgtgtggcttccggtgctggcctgcctacctcccgtcagaccaccatcatggtcaccaagtactccgagaagtcccccatcaccatccctttcgagctgtccgctgcttgcctgacttacctgcgtgaaaccttcgagggcaccatcctggacaagatcctgaacgtcgaggctatgcacaccgtgctgcgtgctctgaagaacaccgctgacgctatggaacgtggcctgatccacagcttcctccagaccctgctgaggaaggctcccccctacttcgtggtgcagaccctggtcgagaacgctaccctggctcgtcaggctctgaaccgtatccagcgctccaacatcctgcagtccttcaaggctaagatgctggctaccctgttcctgctgaaccgtacccgtgaccgtgactacgtgctgaagttcctgacccgtctggctgaggctgctaccgactccatcctcgacaaccctactacctacaccacctcctccggtgctaagatctccggtgtcatggtgtccaccgctaacgtgatgcagatcatcatgtccctgctgtcctcccacatcactaaggaaaccgtgtccgctcccgctacctacggcaacttcgtgctgtcccccgagaacgctgtgaccgctatctcctaccactctatcctggctgacttcaactcctacaaggctcacctgacctccggccagccccacctccccaacgactccctgagccaggctggtgctcactccctgacccccctgtccatggacgtgatccgtctgggcgaaaagaccgtgatcatggaaaacctgcgtcgcgtgtacaagaacaccgacaccaaggaccccctggaacgtaacgtggacctgaccttcttcttccccgtgggcctgtacctgcccgaggaccgtggttacaccaccgtcgagtccaaggtcaagctgaacgacaccgtgcgtaacgctctgcccaccaccgcttacctgctgaacagggaccgtgctgtgcaaaagatcgacttcgtggacgctctcaagaccctgtgccaccccgtgctgcacgagcctgctccatgcctgcaggctttcaccgagcgtggtcccccatccgagcccgctatgcagcgtctgctggaatgccgtttccagcaagagcccatgggtggtgctgctcgtcgtatcccccacttctaccgtgtgcgccgcgaggtgccccgtaccgtgaacgagatgaagcaggacttcgtggtcaccgacttctacaaggttggaaacatcaccctgtacaccgagctgcaccctttcttcgacttcacccactgccaagagaactccgagactgtggctctgtgcaccccccgtatcgtgatcggcaacctgcccgacggcctggctcccggtcccttccacgagctgaggacctgggagatcatggaacacatgcgcctgcgtcccccacccgactacgaggaaaccctgcgtctgttcaagaccaccgtgacctcccccaactaccccgagctgtgctacctggtggacgtgctggtgcacggcaacgctgacgctttcctgctgatccgcgctttcatcgctcgttgcatcgtgaacatgttccacacccgtcagctgctggtgttcgctcactcctacgctctggtcaccctgatcgctgagcacctggctgacggtgctctgcccccccagctcctgttccactaccgtaacctggtggctgtgctgcgcctggtcacccgtatctccgctctgcccggcctgaacaacggccagctggctgaggaacccctgtccgcttacgtgaacgctctgcacgaccacaggctgtggccccccttcgtgacccacctccctcgtaacatggaaggtgtccaggtggtggctgatcgtcagcccctgaaccccgctaacatcgaggctcgtcaccacggtgtctccgacgtgccccgtctgggtgctatggacgctgacgagcccctgttcgtggacgactaccgtgctaccgacgacgagtggaccctgcaaaaggtgttctacctgtgcctgatccccgctatgaccaacaaccgtgcttgcggcctgggcctgaacctcaagactctgctggtggacctgttctaccgtcccgccttcctgctcatgcccgctgctaccgctgtgtccacctccggcaccacctccaaggaatccacctctggtgtcacccccgaggactccgtggctgctcagcgtcaggctgtgggcgagatgctgaccgagctggtcgaggacgtggccaccgacgctcacacccctctgctgcaggcttgccgcgagctgttcctggctgtgcagttcgtgggcgagcacgtgaaggtgctggaagtgcgtgctcccctggaccacgctcagaggcagggactgcccgacttcatctcccgtcagcatgtgctgtacaacggttgctgcgtcgtgaccgctcctaagaccctgatcgagtactccctgcccgtgcccttccaccgtttctactccaaccccaccatctgcgctgctctgtccgacgacatcaagcgttacgtgaccgagttcccccactaccatagacacgatggtggtttccccctgcccaccgctttcgctcacgagtaccacaactggctgcgtagccccttctcccgttactccgctacctgccccaacgtgctgcactccgtgatgaccctggctgctatgctgtacaagatctcccccgtgtccctggtgctgcagaccaaggctcacatccaccccggtttcgctctgaccgctgtgcgtaccgacaccttcgaggtggacatgctgctgtactccggcaagtcctgcacctccgtcatcatcaacaaccccatcgtgaccaaggaagagagggacatctccaccacctaccacgtgacccagaacatcaacaccgtggacatgggcctgggttacacctccaacacttgcgtggcctacgtgaaccgcgtccgcaccgacatgggtgtccgtgtgcaggacctgttccgtgtgttccccatgaacgtgtaccgccacgatgaggtggaccgttggatcaggcacgctgctggcgtcgagcgtccccagctgctggacaccgagactatctccatgctgaccttcggttccatgtccgagcgcaacgctgctgctaccgtgcacggccagaaggctgtctgcgagctgatcctgacccctgtgactatggacgtgaactacttcaagatcaccaacaaccctcgtggtcgtgcttcctgcatgctgggcgtggacccctacgacaccgaggctgccaccaaggctatctacgaccaccgcgaggctgacgctcagaccttcgctgctacccacaacccatgggcttcccaggctggttgcctgtccgacgtcctgtacaacacccgtcaccgcgagcgtctgggctacaactccaagttctactccccctgcgctcagtacttcaacaccgaggaaatcatcgctgccaacaagaccctcttcaagaccatcgacgagtacctgctgcgcgctaaggactgcatccgtggcgacaccgacactcagtacgtgtgcgtcgagggaaccgagcagctgatcgagaacccttgccgtctgacccaagaggctctgcccatcctgtccaccaccaccctggctctgatggaaactaagctgaagggtggcgctggtgctttcgctacctccgagactcacttcggcaactacgtcgtgggagagatcatccccctgcagcagtccatgctgttcaacagctaagagctcaagcttgtcgagaagtactagaggatcataatcagccataccacatttgtagaggttttacttgctttaaaaaacctcccacacctccccctgaacctgaaacataaaatgaatgcaattgttgttgttaacttgtttattgcagcttataatggttacaaataaagcaatagcatcacaaatttcacaaataaagcatttttttcactgcattctagttgtggtttgtccaaactcatcaatgtatcttatcatgtctggatctgatcactgcttgagcctagaagatccggctgctaacaaagcccgaaaggaagctgagttggctgctgcccaccgctgagcaataactatcataacccccggaatattaatagatcatggagataattaaaatgataaccatctcgcaaataaataagtattttactgttttcgtaacagttttgtaataaaaaaacctataaatattccggattattcataccgtcccaccatcgggcgcggatccgccaccatggctgctatggaagctaacatcttctgcaccttcgaccacaagctgtctatcgctgacgtgggcaagctgaccaagctggtggctgctgtggtgcccatcccccagcgtctgcacctgatcaagcactaccagctgggcctgcaccagttcgtggaccacacccgtggttacgtgcgtctgcgtggcctgctgcgtaacatgaccctgaccctgatgcgtcgtgtcgagggcaaccagatcctgctgcacgtgcccacccacggcctgctgtacaccgtgctgaacaccggtcccgtgacctgggagaagggcgacgctctgtgcgtgctgccccccctgttccacggtcccctggctcgtgaaaacctgttgaccctgggccagtgggagctggtgctgccctggatcgtgcccatgcccctggctctggaaatcaaccagcgcctgctgatcatgggcctgttctccctggaccgttcctacgaagaagtgaaggctgctgtccagcagctgcagaccatcaccttccgtgacgctaccttcaccatccccgaccccgtgatcgaccagcacctcctgatcgacatgaagaccgcttgcctgtccatgtccatggtggctaacctggcttccgagctgaccatgacctacgtccgcaagctggctttggaggactcttccatgctgctggtcaagtgccaagagctgctgatgcgtctggaccgcgagcgttccgtgggcgagcctcgtactcccgctcgtcctcagcacgtgtcccccgacgacgagatcgctcgtctgtccgctctgttcgtgatgctgcgtcagctggacgacctgatccgcgagcaggtcgtgttcaccgtgtgcgacgtgagcccagacaacaagtccgctacctgcatcttcaagggctaaggcgcgccaagcttgtcgagaagtactagaggatcataatcagccataccacatttgtagaggttttacttgctttaaaaaacctcccacacctccccctgaacctgaaacataaaatgaatgcaattgttgttgttaacttgtttattgcagcttataatggttacaaataaagcaatagcatcacaaatttcacaaataaagcatttttttcactgcattctagttgtggtttgtccaaactcatcaatgtatcttatcatgtctggatctgatcactgcttgagcctagaagatccggctgctaacaaagcccgaaaggaagctgagttggctgctgcccaccgctgagcaataactatcataacccccggaatattaatagatcatggagataattaaaatgataaccatctcgcaaataaataagtattttactgttttcgtaacagttttgtaataaaaaaacctataaatattccggattattcataccgtcccaccatcgggcgcggatccggtccgaagcgcgcggaattcaaaggcctacgtcgacgccaccatggaaatgaacaaggtgctgcatcaggatctggtgcaggctacccgtcatatcctgaagctggacccctccgagctgcgtgtgaccgacgctggcctgatctgcaagaaccccaactactccgtgtgcgacgctatgctcaagaccgacaccgtgtactgcgtcgagtacctgctgtcctactgggagtcccgtaccgaccacgtgccctgcttcatcttcaagaacaccggttgcgctgtgtccctgtgctgcttcgtgcgtgctcccgtgaagctggtgtcccctgctcgtcacgtgggcgagttcaacgtgctgaaggtcaacgagtccctgatcgtgaccctgaaggacatcgaggaaatcaagccctccgcttacggtgtcctgactaagtgcgtcgtccgcaagtccaactccgcttccgtgttcaacatcgagctgatcgctttcggtcccgagaacgagggcgagtacgagaacctgctgcgcgagctgtacgctaagaaggctgcttccacctccctggctgtgcgtaaccacgtgaccgtgtcctcccactccggttccggtccctccctgtggcgtgctcgtatgtccgctgctctgacccgtaccgctggcaagcgctcctccaggactgctagccctccaccaccacctcctcgtcaccctagctgctctcccactatggtggctgctggtggagctgctgctggtcctagacctccccctcctcctatggctgctggatcctggcgtctgtgccgttgcgaggcttgcatgggccgttgcggttgcgcttccgagggcgacgctgacgaggaagaggaagagttgctggctctggctggcgagggcaaggctgctgctgccgctgccggtcaagacgtcggtggttccgctcgtcgtcccctcgaggaacacgtgtcccgtcgtcgtggtgtctccacccaccaccgtcaccccccttccccaccttgcgctccctccctggaacgtaccggttaccgttgggctccttcctcctggtggcgcgctcgttctggtccttcccgtccccagtccggtccctggctgcctgctcgtttcgctaccctgggtcccctggtcctggctctgctgttggtgctggccctgctgtggcgtggtcacggtcaatcccccagccccacccgttccgctcaccgtgactaaaagcttgtcgagaagtactagaggatcataatcagccataccacatttgtagaggttttacttgctttaaaaaacctcccacacctccccctgaacctgaaacataaaatgaatgcaattgttgttgttaacttgtttattgcagcttataatggttacaaataaagcaatagcatcacaaatttcacaaataaagcatttttttcactgcattctagttgtggtttgtccaaactcatcaatgtatcttatcatgtctggatctgatcactgcttgagcctagaagatccggctgctaacaaagcccgaaaggaagctgagttggctgctgtggctagctttgtttaactttaagaaggagatacatctagaccggaatattaatagatcatggagataattaaaatgataaccatctcgcaaataaataagtattttactgttttcgtaacagttttgtaataaaaaaacctataaatattccggattattcataccgtcccaccatcgggcgcggatcccggtccgaagcgcgcggaattcaaaggcctacgtcgacgccaccatgtccaacaccgctcccggtcccaccgtggctaacaagcgtgacgagaagcaccgtcacgtggtcaacgtggtgctcgagctgcccaccgagatctccgaggctacccaccccgtgctggctaccatgctgtccaagtacacccgtatgtcctccctgttcaacgacaagtgcgctttcaagctggacctgctgcgtatggtggctgtgtcccgtacccgtcgctaaaagcttgtcgagaagtactagaggatcataatcagccataccacatttgtagaggttttacttgctttaaaaaacctcccacacctccccctgaacctgaaacataaaatgaatgcaattgttgttgttaacttgtttattgcagcttataatggttacaaataaagcaatagcatcacaaatttcacaaataaagcatttttttcactgcattctagttgtggtttgtccaaactcatcaatgtatcttatcatgtctggatctgatcactgcttgagcctagaagatccggctgctaacaaagcccgaaaggaagctgagttggctgctgggtgcctaatgagtgagctaactcacattaattgcccggaatattaatagatcatggagataattaaaatgataaccatctcgcaaataaataagtattttactgttttcgtaacagttttgtaataaaaaaacctataaatattccggattattcataccgtcccaccatcgggcgcggatcccggtccgaagcgcgcggaattcgccaccatggacgctcgtgctgtggctaagcgtccccgtgaccccgctgacgaggacaacgagctggtcaccgctctgaaggctaagcgtgaagtgaacaccatctccgtgcgttacctgtaccacgctgaccaccaggctctgaccgctcgtttcttcgtgcccgagggcctggtcgagttcgaggctcagcccggtgctctgctgatccgtatggaaaccggttgcgactccccccgtcacctgtacatctccctgtacctgctgggtatccgtgcttccaacgtgtccgcttccacccgttgcctgctcgagtccgtgtacaccgcttccgctgctcgtgctgctctgcagtggctggacctgggtccccacctcctgcaccgtcgtctggaaaccctgggttgcgtcaagaccgtgtccctgggtatcacctccctgctgacctgcgtgatgcgcggctacctgtacaacaccctcaagaccgaggtgttcgctctgatgatccccaaggacatgtacctgacctgggaggaaacccgcggtcgtctgcagtacgtgtacctgatcatcgtgtacgactacgacggtcccgagactcgtcccggtatctacgtgctgacctcctctatcgctcactggcagaccctggtggacgtggcccgtggaaagttcgctcgtgaacgctgctccttcgtgaaccgtcgtatcacccgtccccgtcagatccccctgtgcaccggtgtcatccaaaagctgggctggtgcctggctgacgacatccacacctcattcctcgtgcacaaggaactgaagctgtccgtcgtgcgtctggacaacttctccgtcgagctgggcgacttccgcgagttcgtgtaaaagcttgtcgagaagtactagaggatcataatcagccataccacatttgtagaggttttacttgctttaaaaaacctcccacacctccccctgaacctgaaacataaaatgaatgcaattgttgttgttaacttgtttattgcagcttataatggttacaaataaagcaatagcatcacaaatttcacaaataaagcatttttttcactgcattctagttgtggtttgtccaaactcatcaatgtatcttatcatgtctggatctgatcactgcttgagcctagaagatccggctgctaacaaagcccgaaaggaagctgagttggctgctgccaccgctgagcaataactatcataacccctaggagatccgaaccagataagtgaaatctagttccaaactattttgtcatttttaattttcgtattagcttacgacgctacacccagttcccatctattttgtcactcttccctaaataatccttaaaaactccatttccacccctcccagttcccaactattttgtccgcccaca

SEQ ID NO: 7 - DNA, 21442 bp, Artificial Sequence
  Synthetic construct
ttgttccagtttggaacaagagtccactattaaagaacgtggactccaacgtcaaagggcgaaaaaccgtctatcagggcgatggcccactacgtgaaccatcaccctaatcaagttttttggggtcgaggtgccgtaaagcactaaatcggaaccctaaagggagcccccgatttagagcttgacggggaaagccggcgaacgtggcgagaaaggaagggaagaaagcgaaaggagcgggcgctagggcgctggcaagtgtagcggtcacgctgcgcgtaaccaccacacccgccgcgcttaatgcgccgctacagggcgcgtcgcgccattcgccattcaggctgcgcaactgttgggaagggcgatcggtgcgggcctcttcgctattacgccagctggcgaaagggggatgtgctgcaaggcgattaagttgggtaacgccagggttttcccagtcacgacgttgtaaaacgacggccagtgcatagaccagccgcgtaacctggcaaaatcggttacggttgagtaataaatggatgccctgcgtaagcgggtgtgggcggacaataaagtcttaaactgaacaaaatagatctaaactatgacaataaagtcttaaactagacagaatagttgtaaactgaaatcagtccagttatgctgtgaaaaagcatactggacttttgttatggctaaagcaaactcttcattttctgaagtgcaaattgcccgtcgtattaaagaggggcgtggccaagggcatggtaaagactatattcgcggcgttgtgacaatttaccgaacaactccgcggccgggaagccgatctcggcttgaacgaattgttaggtggcggtacttgggtcgatatcaaagtgcatcacttcttcccgtatgcccaactttgtatagagagccactgcgggatcgtcaccgtaatctgcttgcacgtagatcacataagcaccaagcgcgttggcctcatgcttgaggagattgatgagcgcggtggcaatgccctgcctccggtgctcgccggagactgcgagatcatagatatagatctcactacgcggctgctcaaacttgggcagaacgtaagccgcgagagcgccaacaaccgcttcttggtcgaaggcagcaagcgcgatgaatgtcttactacggagcaagttcccgaggtaatcggagtccggctgatgttgggagtaggtggctacgtctccgaactcacgaccgaaaagatcaagagcagcccgcatggatttgacttggtcagggccgagcctacatgtgcgaatgatgcccatacttgagccacctaactttgttttagggcgactgccctgctgcgtaacatcgttgctgctgcgtaacatcgttgctgctccataacatcaaacatcgacccacggcgtaacgcgcttgctgcttggatgcccgaggcatagactgtacaaaaaaacagtcataacaagccatgaaaaccgccactgcgccgttaccaccgctgcgttcggtcaaggttctggaccagttgcgtgagcgcatacgctacttgcattacagtttacgaaccgaacaggcttatgtcaactgggttcgtgccttcatccgtttccacggtgtgcgtcacccggcaaccttgggcagcagcgaagtcgaggcatttctgtcctggctggcgaacgagcgcaaggtttcggtctccacgcatcgtcaggcattggcggccttgctgttcttctacggcaaggtgctgtgcacggatctgcccttgcttcaggagatcggtagacctcggccgtcgcggcgcttgccggtggtgctgaccccggatgaagtggttcgcatcctcggttttctggaaggcgagcatcgtttgttcgcccaggactctagctatagttctagtggttggctacagctttgtttgtactatcaacaggttgaactgctgatcaacagatcctctacgcggccgcggtaccataacttcgtatagcatcacattatacgaagttatctggtttaaacgtacccgtagtggctatggcagggcttgccgccccgacgttggctgcgagccctgggccttcacccgaacttgggggttggggtggggaaaaggaagaaacgcgggcgtattggtcccaatggggtctcggtggggtatcgacagagtgccagccctgggaccgaaccccgcgtttatgaacaaacgacccaacacccgtgcgttttattctgtctttttattgccgtcatagcgcgggttccttccggtattgtctccttccgtgtttcagttagcctcccccatctcccggtaccgcatgctatgcatcagctgctagcaccatggctcgagatcccgggtgatcaagtcttcgtcgagtgattgtaaataaaatgtaatttacagtatagtattttaattaatatacaaatgatttgataataattcttatttaactataatatattgtgttgggttgaattaaaggtccgtatactagtatcgattcgcgacctactccggaatattaatagatcatggagataattaaaatgataaccatctcgcaaataaataagtattttactgttttcgtaacagttttgtaataaaaaaacctataaatattccggattattcataccgtcccaccatcgggcgcggatcccggtccgaagcgcgcggaattcaaaggcctaccgtcgacgccaccatggaatcccgtggtcgtcgttgccccgagatgatctccgtgctgggtcccatctccggtcacgtcctgaaggctgtgttctcccgtggcgacacccccgtgctgccccacgaaactcgtctgctgcagaccggtatccacgtgcgtgtgtcccagccctccctgatcctggtgtcccagtacacccccgactccaccccttgccaccgcggagacaaccagctgcaggtccagcacacctacttcaccggttccgaggtcgagaacgtgtccgtgaacgtgcacaaccccaccggtcgttccatctgcccctcccaagagcccatgtccatctacgtgtacgctctgcccctgaagatgctgaacatcccctccatcaacgtgcaccactacccctccgctgctgagcgcaagcaccgtcacctccccgtggctgacgctgtgatccacgcttccggcaagcagatgtggcaggctcgtctgaccgtgtccggcctggcttggacccgtcagcagaaccagtggaaggaacccgacgtgtactacacctccgctttcgtgttccccaccaaggacgtggccctgcgtcacgtcgtgtgcgctcacgaactcgtgtgctccatggaaaacacccgtgctaccaagatgcaagtgatcggcgaccagtacgtgaaggtgtacctggaatccttctgcgaggacgtgccctccggcaagctgttcatgcacgtgaccctgggttccgacgtggaagaggacctgaccatgacccgtaacccccagcccttcatgcgtccccacgagcgtaacggtttcaccgtgctgtgccccaagaacatgatcatcaagcccggcaagatctcccacatcatgctggacgtggccttcacctcccacgagcacttcggcctgctgtgccctaagtccatccccggcctgtccatctccggcaacctgctgatgaacggccagcagatcttcctggaagtgcaggctatccgtgaaaccgtcgagctgcgtcagtacgaccctgtggctgctctgttcttcttcgacatcgacctgctgctgcagcgtggtccccagtactccgagcaccccaccttcaccagccagtaccgtatccagggcaagctggaataccgtcacacctgggaccgtcacgacgagggtgctgctcagggcgacgacgacgtgtggacctccggttccgactccgacgaggaactggtcaccaccgagcgcaagaccccccgtgtgaccggtggtggtgctatggctggtgcttccacctccgctggtcgcaagcgcaagtccgcttcctccgctaccgcttgcaccgctggtgtcatgacccgtggtcgcctgaaggctgagtccaccgtggctcccgaagaggacactgacgaggactccgacaacgagatccacaaccccgctgtgttcacctggcccccctggcaggctggtatcctggctcgtaacctggtgcccatggtggctaccgtgcagggccagaacctgaagtaccaagagttcttctgggacgccaacgacatctaccgtatcttcgctgagctggaaggcgtgtggcagcccgctgctcagcccaagcgtcgtcgtcaccgtcaggacgctctgcctggtccctgtatcgcttccacccccaagaagcaccgcggctaaaagcttgtcgagaagtactagaggatcataatcagccataccacatttgtagaggttttacttgctttaaaaaacctcccacacctccccctgaacctgaaacataaaatgaatgcaattgttgttgttaacttgtttattgcagcttataatggttacaaataaagcaatagcatcacaaatttcacaaataaagcatttttttcactgcattctagttgtggtttgtccaaactcatcaatgtatcttatcatgtctggatctgatcactgcttgagcctagaagatccggctgctaacaaagcccgaaaggaagctgagttggctgctgtggctagctttgtttaactttaagaaggagatacatctagacctgcaggccggaatattaatagatcatggagataattaaaatgataaccatctcgcaaataaataagtattttactgttttcgtaacagttttgtaataaaaaaacctataaatattccggattattcataccgtcccaccatcgggcgcggatcccggtccgaagcgcgcggaattcgccaccatgaccatggacgagcagcagccccaggctgtgacccccgtgtacgtgggcggtttcctggctcgttacgaccagtcccccgacgaggctgagctgctgctgccacgtgacgtggtcgaacactggctgcacgctcagggccagggacagccttccctgtccgtggctctgcccctgaacatcaaccacgacgacaccgctgtcgtgggtcacgtggccgctatgcagtccgtgcgtgacggcctgttctgcctgggttgcgtgacctccccccgtttcctggaaatcgtgcgtcgtgcttccgagaagtccgagctggtgtcccgtggtcccgtgtccccactgcagcccgacaaggtggtcgagttcctgtccggttcctacgctggcctgtccctgtcatcccgtcgttgcgacgacgtcgaggctgctacctccctgagcggctccgagactacccccttcaagcacgtggccctgtgctccgtgggtcgtaggcgtggaaccctggctgtgtacggtcgtgaccccgagtgggtcacccagcgtttccccgacctgaccgctgctgaccgtgacggactgcgtgctcagtggcagcgttgcggttccaccgctgtggacgcttccggcgaccccttccgttccgactcctacggcctgctgggcaactccgtggacgctctgtacatccgcgagcgtctgcccaagctgcgttacgacaagcagctcgtgggtgtcaccgagcgcgagtcctacgtgaaggcttccgtgtcccccgaggctgcttgcgacatcaaggctgcttccgctgagcgttctggcgacagccgctcccaggctgctactcctgctgctggtgctcgtgtgccctccagctccccatccccacctgtcgagcctccctcccccgtgcaacctcctgctctgcctgcttccccctccgtgctgcctgctgagtccagcccctccctgtcaccctctgagcctgctgaggctgcctccatgtcccaccctctgagcgctgctgtgactgctgctaccgctccccctggtgctactgtggctggtgcttcccccgctgtgccttccctggcttggcctcacgacggtgtctacctgcccaaggacgctttcttctccctgctgggcgcttcccgttccgctgctcccgtgatgtaccccggtgctgtggctgctccccccagcgcttcacctgctcctctgcccctgccctcctaccccgcttcctacggtgctcccgtcgtgggttacgaccagctggctgctcgtcacttcgctgactacgtggacccccactaccccggctggggtcgtcgttacgagcccgctccttccctgcacccatcctaccctgtgccccctcctccatcacccgcttactaccgtcgtcgtgactcccccggtggcatggacgagcctccatctggatgggagcgttacgacggttcccaccgtggccagtcccaaaagcagcaccgtcacggtggttccggtggtcacaacaagcgtcgcaaggaagccgctgctgcatcctccagctccgacgaggacctgagcttccccggcgaggctgaacacggtcgtgctcgcaagcgtctgaagtcccacgtgaactccgacggaggtagcggaggccacgctggttccaaccagcagcagcaacagcgctacgacgagctgcgtgacgctatccacgagctgaagcgtgacctgttcgctgctcgccagtcctccaccctgctgtctgctgctctgccagctgccgcttcttcctcccctaccaccaccaccgtgtgcacccctactggcgagctgacctctggtggtggcgagactcccaccgctctgctgtccggtggtgctaaggtggccgagcgtgctcaggctggtgtcgtgaacgcttcctgccgtctggctaccgcttccggttccgaggctgccaccgctggtccctctaccgctggttcctcatcctgcccagcttccgtggtgctggctgccgctgctgctcaagccgccgctgcttcacagtcccccccaaaggatatggtggacctgaaccgtcgtatcttcgtggctgctctgaacaagctcgagtaataaaagcttgtcgagaagtactagaggatcataatcagccataccacatttgtagaggttttacttgctttaaaaaacctcccacacctccccctgaacctgaaacataaaatgaatgcaattgttgttgttaacttgtttattgcagcttataatggttacaaataaagcaatagcatcacaaatttcacaaataaagcatttttttcactgcattctagttgtggtttgtccaaactcatcaatgtatcttatcatgtctggatctgatcactgcttgagcctagaagatccggctgctaacaaagcccgaaaggaagctgagttggctgctgccaccgctgagcaataactatcataacccctaggggcctctaaacgggtcttgaggggttttttgctgaaaggaggaactatatccggatctgaacaggagggacagctgatagaaacagaagccactggagcacctcaaaaacaccatcatacactaaatcagtaagttggcagcatcacccgacgcactttgcgccgaataaatacctgtgacggaagatcacttcgcagaataaataaatcctggtgtccctgttgataccgggaagccctgggccaacttttggcgaaaatgagacgttgatcggcacgtaagaggttccaactttcaccataatgaaataagatcactaccgggcgtattttttgagttatcgagattttcaggagctaaggaagctaaaatggagaaaaaaatcactggatataccaccgttgatatatcccaatggcatcgtaaagaacattttgaggcatttcagtcagttgctcaatgtacctataaccagaccgttcagctggatattacggcctttttaaagaccgtaaagaaaaataagcacaagttttatccggcctttattcacattcttgcccgcctgatgaatgctcatccggaattccgtatggcaatgaaagacggtgagctggtgatatgggatagtgttcacccttgttacaccgttttccatgagcaaactgaaacgttttcatcgctctggagtgaataccacgacgatttccggcagtttctacacatatattcgcaagatgtggcgtgttacggtgaaaacctggcctatttccctaaagggtttattgagaatatgtttttcgtctcagccaatccctgggtgagtttcaccagttttgatttaaacgtggccaatatggacaacttcttcgcccccgttttcaccatgggcaaatattatacgcaaggcgacaaggtgctgatgccgctggcgattcaggttcatcatgccgtttgtgatggcttccatgtcggcagaatgcttaatgaattacaacagtactgcgatgagtggcagggcggggcgtaatttttttaaggcagttattggtgcccttaaacgcctggttgctacgcctgaataagtgataataagcggatgaatggcagaaattcgaaagcaaattcgacccggtcgtcggttcagggcagggtcgttaaatagccgcttatgtctattgctggtttaccggtttattgactaccggaagcagtgtgaccgtgtgcttctcaaatgcctgaggccagtttgctcaggctctccccgtggaggtaataattgacgatatgatcatttattctgcctcccagctgacattcatccggggtcagcaccgtttctgcggactggctttctacgtgttccgcttcctttagcagcccttgcgccctgagtgcttgcggcagcgtgaagctaattctgtcagccgttaagtgttcctgtgtcactcaaaattgctttgagaggctctaagggcttctcagtgcgttacatccctggcttgttgtccacaaccgttaaaccttaaaagctttaaaagccttatatattcttttttttcttataaaacttaaaaccttagaggctatttaagttgctgatttatattaattttattgttcaaacatgagagcttagtacgtgaaacatgagagcttagtacgttagccatgagagcttagtacgttagccatgagggtttagttcgttaaacatgagagcttagtacgttaaacatgagagcttagtacgtgaaacatgagagcttagtacgtactatcaacaggttgaactgctgatcaacagatcctctacgcggccgcggtaccataacttcgtatagcatacattatacgaagttatctggtttaaacgtacccgtagtggctatggcagggcttgccgccccgacgttggctgcgagccctgggccttcacccgaacttgggggttggggtggggaaaaggaagaaacgcgggcgtattggtcccaatggggtctcggtggggtatcgacagagtgccagccctgggaccgaaccccgcgtttatgaacaaacgacccaacacccgtgcgttttattctgtctttttattgccgtcatagcgcgggttccttccggtattgtctccttccgtgtttcagttagcctcccccatctcccggtaccgcatgctatgcatcagctgctagcttactgcagccaccaccacagggagttcagggtggacaggttcacagcacgacggtgctcagggggggtcaggttgccgtaggtggaggactgcaggctgaagttacggatctcagacaggaacagcagggagtccaggtagtcccacatggggtcgatgaaggtgcgctggaaacgggtggatggggaggtgggggtggtcttgttgttgtcggaagcagtctcgttctcgacgggcatggtgtcgttgtagtacagggaggacatgtccagggtgccgtagatggtgtagggagtctcgttacggatcagcacgtgagtgttcttcatgaactcggacacagcggtacggttacggttgggcttgcagaagggctcgtcacggtaacgcagggtggtgtacacccaggtagccaggtccttcagctgagtggtcaggatagacttcatgaagttctcgtcgggacggtaaccgatggtagaggtggggatacgggtgggcacgatgggggagtaggtcacgttggtggaaacgttgaagatggtggaggtgtaggaggagtagggggtagtagtgctgacgcgggacttcttggagatggacttcacgggagcctgcttgcgcttcagcttgcgcatggtgttcttcagcttggtggagttgatgtacttgggcacacggaagatgttacgggacatagcgttgaccaggtagaaggaacgggtgcagttgcgctgagcgtaacgcagcagcagagcagccaggcccaggaagtagatagtctgggagtccacgttgaccttggaggggcccacgtacagcttggtgttccaacggggcacgttgaagaacatggggttgaaggtggtgaagttgccgcagttttcctcgccggtgttgttacgacgggacacgttcagcatctcggacaggcaggtcatggaggggatggtgccgcaagaggggggacggaaggtgatcttctggccggtgtggttgtactcggagtacacgtacttagcgggcttgcgcagctgggtggtgtggaagtcgaaccacaggtgggtgatggagtggttacggatgggaccagccaggatggagttgggggggaactgcttcatctcgacggtgatgttgtacagcttctgctggctggggaaggtgaagaacttgtagtagtcgccggtcttggaagccagctcttgcaggatacgcagcttcagctggcgttcctcttccttagccttctgggacttcacacggaaacgagccacagcgatcttgcagttgatgaagctgaacagcaggaaggtcagggacatcaggaagaacaggttgaacacgccacgcatctcgcccttgcgacccatggtggcctcgaggagatcccgggtgatcaagtcttcgtcgagtgattgtaaataaaatgtaatttacagtatagtattttaattaatatacaaatgatttgataataattcttatttaactataatatattgtgttgggttgaattaaaggtccgtatactagtatcgattcgcgacctactccggaatattaatagatcatggagataattaaaatgataaccatctcgcaaataaataagtattttactgttttcgtaacagttttgtaataaaaaaacctataaatattccggattattcataccgtcccaccatcgggcgcggatccgccaccatggaaaactggtccgctctggaactgctgcccaaggtcggaatccctaccgacttcctgacccacgtcaagacctccgctggcgaggaaatgttcgaggctctgaggatctactacggcgacgaccccgagcgttacaacatccacttcgaggctatcttcggcaccttctgcaaccgtctggaatgggtgtacttcctgacttccggcctggctgctgctgctcacgctatcaagttccacgacctgaacaagctgaccaccggcaagatgctgttccacgtgcaagtgccccgtgtggcttccggtgctggcctgcctacctcccgtcagaccaccatcatggtcaccaagtactccgagaagtcccccatcaccatccctttcgagctgtccgctgcttgcctgacttacctgcgtgaaaccttcgagggcaccatcctggacaagatcctgaacgtcgaggctatgcacaccgtgctgcgtgctctgaagaacaccgctgacgctatggaacgtggcctgatccacagcttcctccagaccctgctgaggaaggctcccccctacttcgtggtgcagaccctggtcgagaacgctaccctggctcgtcaggctctgaaccgtatccagcgctccaacatcctgcagtccttcaaggctaagatgctggctaccctgttcctgctgaaccgtacccgtgaccgtgactacgtgctgaagttcctgacccgtctggctgaggctgctaccgactccatcctcgacaaccctactacctacaccacctcctccggtgctaagatctccggtgtcatggtgtccaccgctaacgtgatgcagatcatcatgtccctgctgtcctcccacatcactaaggaaaccgtgtccgctcccgctacctacggcaacttcgtgctgtcccccgagaacgctgtgaccgctatctcctaccactctatcctggctgacttcaactcctacaaggctcacctgacctccggccagccccacctccccaacgactccctgagccaggctggtgctcactccctgacccccctgtccatggacgtgatccgtctgggcgaaaagaccgtgatcatggaaaacctgcgtcgcgtgtacaagaacaccgacaccaaggaccccctggaacgtaacgtggacctgaccttcttcttccccgtgggcctgtacctgcccgaggaccgtggttacaccaccgtcgagtccaaggtcaagctgaacgacaccgtgcgtaacgctctgcccaccaccgcttacctgctgaacagggaccgtgctgtgcaaaagatcgacttcgtggacgctctcaagaccctgtgccaccccgtgctgcacgagcctgctccatgcctgcaggctttcaccgagcgtggtcccccatccgagcccgctatgcagcgtctgctggaatgccgtttccagcaagagcccatgggtggtgctgctcgtcgtatcccccacttctaccgtgtgcgccgcgaggtgccccgtaccgtgaacgagatgaagcaggacttcgtggtcaccgacttctacaaggttggaaacatcaccctgtacaccgagctgcaccctttcttcgacttcacccactgccaagagaactccgagactgtggctctgtgcaccccccgtatcgtgatcggcaacctgcccgacggcctggctcccggtcccttccacgagctgaggacctgggagatcatggaacacatgcgcctgcgtcccccacccgactacgaggaaaccctgcgtctgttcaagaccaccgtgacctcccccaactaccccgagctgtgctacctggtggacgtgctggtgcacggcaacgctgacgctttcctgctgatccgcgctttcatcgctcgttgcatcgtgaacatgttccacacccgtcagctgctggtgttcgctcactcctacgctctggtcaccctgatcgctgagcacctggctgacggtgctctgcccccccagctcctgttccactaccgtaacctggtggctgtgctgcgcctggtcacccgtatctccgctctgcccggcctgaacaacggccagctggctgaggaacccctgtccgcttacgtgaacgctctgcacgaccacaggctgtggccccccttcgtgacccacctccctcgtaacatggaaggtgtccaggtggtggctgatcgtcagcccctgaaccccgctaacatcgaggctcgtcaccacggtgtctccgacgtgccccgtctgggtgctatggacgctgacgagcccctgttcgtggacgactaccgtgctaccgacgacgagtggaccctgcaaaaggtgttctacctgtgcctgatccccgctatgaccaacaaccgtgcttgcggcctgggcctgaacctcaagactctgctggtggacctgttctaccgtcccgccttcctgctcatgcccgctgctaccgctgtgtccacctccggcaccacctccaaggaatccacctctggtgtcacccccgaggactccgtggctgctcagcgtcaggctgtgggcgagatgctgaccgagctggtcgaggacgtggccaccgacgctcacacccctctgctgcaggcttgccgcgagctgttcctggctgtgcagttcgtgggcgagcacgtgaaggtgctggaagtgcgtgctcccctggaccacgctcagaggcagggactgcccgacttcatctcccgtcagcatgtgctgtacaacggttgctgcgtcgtgaccgctcctaagaccctgatcgagtactccctgcccgtgcccttccaccgtttctactccaaccccaccatctgcgctgctctgtccgacgacatcaagcgttacgtgaccgagttcccccactaccatagacacgatggtggtttccccctgcccaccgctttcgctcacgagtaccacaactggctgcgtagccccttctcccgttactccgctacctgccccaacgtgctgcactccgtgatgaccctggctgctatgctgtacaagatctcccccgtgtccctggtgctgcagaccaaggctcacatccaccccggtttcgctctgaccgctgtgcgtaccgacaccttcgaggtggacatgctgctgtactccggcaagtcctgcacctccgtcatcatcaacaaccccatcgtgaccaaggaagagagggacatctccaccacctaccacgtgacccagaacatcaacaccgtggacatgggcctgggttacacctccaacacttgcgtggcctacgtgaaccgcgtccgcaccgacatgggtgtccgtgtgcaggacctgttccgtgtgttccccatgaacgtgtaccgccacgatgaggtggaccgttggatcaggcacgctgctggcgtcgagcgtccccagctgctggacaccgagactatctccatgctgaccttcggttccatgtccgagcgcaacgctgctgctaccgtgcacggccagaaggctgtctgcgagctgatcctgacccctgtgactatggacgtgaactacttcaagatcaccaacaaccctcgtggtcgtgcttcctgcatgctgggcgtggacccctacgacaccgaggctgccaccaaggctatctacgaccaccgcgaggctgacgctcagaccttcgctgctacccacaacccatgggcttcccaggctggttgcctgtccgacgtcctgtacaacacccgtcaccgcgagcgtctgggctacaactccaagttctactccccctgcgctcagtacttcaacaccgaggaaatcatcgctgccaacaagaccctcttcaagaccatcgacgagtacctgctgcgcgctaaggactgcatccgtggcgacaccgacactcagtacgtgtgcgtcgagggaaccgagcagctgatcgagaacccttgccgtctgacccaagaggctctgcccatcctgtccaccaccaccctggctctgatggaaactaagctgaagggtggcgctggtgctttcgctacctccgagactcacttcggcaactacgtcgtgggagagatcatccccctgcagcagtccatgctgttcaacagctaagagctcaagcttgtcgagaagtactagaggatcataatcagccataccacatttgtagaggttttacttgctttaaaaaacctcccacacctccccctgaacctgaaacataaaatgaatgcaattgttgttgttaacttgtttattgcagcttataatggttacaaataaagcaatagcatcacaaatttcacaaataaagcatttttttcactgcattctagttgtggtttgtccaaactcatcaatgtatcttatcatgtctggatctgatcactgcttgagcctagaagatccggctgctaacaaagcccgaaaggaagctgagttggctgctgcccaccgctgagcaataactatcataacccccggaatattaatagatcatggagataattaaaatgataaccatctcgcaaataaataagtattttactgttttcgtaacagttttgtaataaaaaaacctataaatattccggattattcataccgtcccaccatcgggcgcggatccgccaccatggctgctatggaagctaacatcttctgcaccttcgaccacaagctgtctatcgctgacgtgggcaagctgaccaagctggtggctgctgtggtgcccatcccccagcgtctgcacctgatcaagcactaccagctgggcctgcaccagttcgtggaccacacccgtggttacgtgcgtctgcgtggcctgctgcgtaacatgaccctgaccctgatgcgtcgtgtcgagggcaaccagatcctgctgcacgtgcccacccacggcctgctgtacaccgtgctgaacaccggtcccgtgacctgggagaagggcgacgctctgtgcgtgctgccccccctgttccacggtcccctggctcgtgaaaacctgttgaccctgggccagtgggagctggtgctgccctggatcgtgcccatgcccctggctctggaaatcaaccagcgcctgctgatcatgggcctgttctccctggaccgttcctacgaagaagtgaaggctgctgtccagcagctgcagaccatcaccttccgtgacgctaccttcaccatccccgaccccgtgatcgaccagcacctcctgatcgacatgaagaccgcttgcctgtccatgtccatggtggctaacctggcttccgagctgaccatgacctacgtccgcaagctggctttggaggactcttccatgctgctggtcaagtgccaagagctgctgatgcgtctggaccgcgagcgttccgtgggcgagcctcgtactcccgctcgtcctcagcacgtgtcccccgacgacgagatcgctcgtctgtccgctctgttcgtgatgctgcgtcagctggacgacctgatccgcgagcaggtcgtgttcaccgtgtgcgacgtgagcccagacaacaagtccgctacctgcatcttcaagggctaaggcgcgccaagcttgtcgagaagtactagaggatcataatcagccataccacatttgtagaggttttacttgctttaaaaaacctcccacacctccccctgaacctgaaacataaaatgaatgcaattgttgttgttaacttgtttattgcagcttataatggttacaaataaagcaatagcatcacaaatttcacaaataaagcatttttttcactgcattctagttgtggtttgtccaaactcatcaatgtatcttatcatgtctggatctgatcactgcttgagcctagaagatccggctgctaacaaagcccgaaaggaagctgagttggctgctgcccaccgctgagcaataactatcataacccccggaatattaatagatcatggagataattaaaatgataaccatctcgcaaataaataagtattttactgttttcgtaacagttttgtaataaaaaaacctataaatattccggattattcataccgtcccaccatcgggcgcggatccggtccgaagcgcgcggaattcaaaggcctacgtcgacgccaccatggaaatgaacaaggtgctgcatcaggatctggtgcaggctacccgtcgtatcctgaagctgggcccctccgagctgcgtgtgaccgacgctggcctgatctgcaagaaccccaactactccgtgtgcgacgctatgctcaagaccgacaccgtgtactgcgtcgagtacctgctgtcctactgggagtcccgtaccgaccacgtgccctgcttcatcttcaagaacaccggttgcgctgtgtccctgtgctgcttcgtgcgtgctcccgtgaagctggtgtcccctgctcgtcacgtgggcgagttcaacgtgctgaaggtcaacgagtccctgatcgtgaccctgaaggacatcgaggaaatcaagccctccgcttacggtgtcctgactaagtgcgtcgtccgcaagtccaactccgcttccgtgttcaacatcgagctgatcgctttcggtcccgagaacgagggcgagtacgagaacctgctgcgcgagctgtacgctaagaaggctgcttccacctccctggctgtgcgtaaccacgtgaccgtgtcctcccactccggttccggtccctccctgtggcgtgctcgtatgtccgctgctctgacccgtaccgctggcaagcgctcctccaggactgctagccctccaccaccacctcctcgtcaccctagctgctctcccactatggtggctgctggtggagctgctgctggtcctagacctccccctcctcctatggctgctggatcctggcgtctgtgccgttgcgaggcttgcatgggccgttgcggttgcgcttccgagggcgacgctgacgaggaagaggaagagttgctggctctggctggcgagggcaaggctgctgctgccgctgccggtcaagacgtcggtggttccgctcgtcgtcccctcgaggaacacgtgtcccgtcgtcgtggtgtctccacccaccaccgtcaccccccttccccaccttgcgctccctccctggaacgtaccggttaccgttgggctccttcctcctggtggcgcgctcgttctggtccttcccgtccccagtccggtccctggctgcctgctcgtttcgctaccctgggtcccctggtcctggctctgctgttggtgctggccctgctgtggcgtggtcacggtcaatcccccagccccacccgttccgctcaccgtgactaaaagcttgtcgagaagtactagaggatcataatcagccataccacatttgtagaggttttacttgctttaaaaaacctcccacacctccccctgaacctgaaacataaaatgaatgcaattgttgttgttaacttgtttattgcagcttataatggttacaaataaagcaatagcatcacaaatttcacaaataaagcatttttttcactgcattctagttgtggtttgtccaaactcatcaatgtatcttatcatgtctggatctgatcactgcttgagcctagaagatccggctgctaacaaagcccgaaaggaagctgagttggctgctgtggctagctttgtttaactttaagaaggagatacatctagaaatattaatagatcatggagataattaaaatgataaccatctcgcaaataaataagtattttactgttttcgtaacagttttgtaataaaaaaacctataaatattccggattattcataccgtcccaccatcgggcgcggatcccggtccgaagcgcgcggaattcaaaggcctacgtcgacgccaccatgtccaacaccgctcccggtcccaccgtggctaacaagcgtgacgagaagcaccgtcacgtggtcaacgtggtgctcgagctgcccaccgagatctccgaggctacccaccccgtgctggctaccatgctgtccaagtacacccgtatgtcctccctgttcaacgacaagtgcgctttcaagctggacctgctgcgtatggtggctgtgtcccgtacccgtcgctaaaagcttgtcgagaagtactagaggatcataatcagccataccacatttgtagaggttttacttgctttaaaaaacctcccacacctccccctgaacctgaaacataaaatgaatgcaattgttgttgttaacttgtttattgcagcttataatggttacaaataaagcaatagcatcacaaatttcacaaataaagcatttttttcactgcattctagttgtggtttgtccaaactcatcaatgtatcttatcatgtctggatctgatcactgcttgagcctagaagatccggctgctaacaaagcccgaaaggaagctgagttggctgctgggtgcctaatgagtgagctaactcacattaattgcccggaatattaatagatcatggagataattaaaatgataaccatctcgcaaataaataagtattttactgttttcgtaacagttttgtaataaaaaaacctataaatattccggattattcataccgtcccaccatcgggcgcggatcccggtccgaagcgcgcggaattcgccaccatggacgctcgtgctgtggctaagcgtccccgtgaccccgctgacgaggacaacgagctggtcaccgctctgaaggctaagcgtgaagtgaacaccatctccgtgcgttacctgtaccacgctgaccaccaggctctgaccgctcgtttcttcgtgcccgagggcctggtcgagttcgaggctcagcccggtgctctgctgatccgtatggaaaccggttgcgactccccccgtcacctgtacatctccctgtacctgctgggtatccgtgcttccaacgtgtccgcttccacccgttgcctgctcgagtccgtgtacaccgcttccgctgctcgtgctgctctgcagtggctggacctgggtccccacctcctgcaccgtcgtctggaaaccctgggttgcgtcaagaccgtgtccctgggtatcacctccctgctgacctgcgtgatgcgcggctacctgtacaacaccctcaagaccgaggtgttcgctctgatgatccccaaggacatgtacctgacctgggaggaaacccgcggtcgtctgcagtacgtgtacctgatcatcgtgtacgactacgacggtcccgagactcgtcccggtatctacgtgctgacctcctctatcgctcactggcagaccctggtggacgtggcccgtggaaagttcgctcgtgaacgctgctccttcgtgaaccgtcgtatcacccgtccccgtcagatccccctgtgcaccggtgtcatccaaaagctgggctggtgcctggctgacgacatccacacctcattcctcgtgcacaaggaactgaagctgtccgtcgtgcgtctggacaacttctccgtcgagctgggcgacttccgcgagttcgtgtaaaagcttgtcgagaagtactagaggatcataatcagccataccacatttgtagaggttttacttgctttaaaaaacctcccacacctccccctgaacctgaaacataaaatgaatgcaattgttgttgttaacttgtttattgcagcttataatggttacaaataaagcaatagcatcacaaatttcacaaataaagcatttttttcactgcattctagttgtggtttgtccaaactcatcaatgtatcttatcatgtctggatctgatcactgcttgagcctagaagatccggctgctaacaaagcccgaaaggaagctgagttggctgctgccaccgctgagcaataactatcataacccctaggagatccgaaccagataagtgaaatctagttccaaactattttgtcatttttaattttcgtattagcttacgacgctacacccagttcccatctattttgtcactcttccctaaataatccttaaaaactccatttccacccctcccagttcccaactattttgtccgcccaca

SEQ ID NO: 8 - DNA, 6004 bp, Artificial Sequence
  Synthetic construct
ttgttccagtttggaacaagagtccactattaaagaacgtggactccaacgtcaaagggcgaaaaaccgtctatcagggcgatggcccactacgtgaaccatcaccctaatcaagttttttggggtcgaggtgccgtaaagcactaaatcggaaccctaaagggagcccccgatttagagcttgacggggaaagccggcgaacgtggcgagaaaggaagggaagaaagcgaaaggagcgggcgctagggcgctggcaagtgtagcggtcacgctgcgcgtaaccaccacacccgccgcgcttaatgcgccgctacagggcgcgtcgcgccattcgccattcaggctgcgcaactgttgggaagggcgatcggtgcgggcctcttcgctattacgccagctggcgaaagggggatgtgctgcaaggcgattaagttgggtaacgccagggttttcccagtcacgacgttgtaaaacgacggccagtgcatagaccagccgcgtaacctggcaaaatcggttacggttgagtaataaatggatgccctgcgtaagcgggtgtgggcggacaataaagtcttaaactgaacaaaatagatctaaactatgacaataaagtcttaaactagacagaatagttgtaaactgaaatcagtccagttatgctgtgaaaaagcatactggacttttgttatggctaaagcaaactcttcattttctgaagtgcaaattgcccgtcgtattaaagaggggcgtggccaagggcatggtaaagactatattcgcggcgttgtgacaatttaccgaacaactccgcggccgggaagccgatctcggcttgaacgaattgttaggtggcggtacttgggtcgatatcaaagtgcatcacttcttcccgtatgcccaactttgtatagagagccactgcgggatcgtcaccgtaatctgcttgcacgtagatcacataagcaccaagcgcgttggcctcatgcttgaggagattgatgagcgcggtggcaatgccctgcctccggtgctcgccggagactgcgagatcatagatatagatctcactacgcggctgctcaaacttgggcagaacgtaagccgcgagagcgccaacaaccgcttcttggtcgaaggcagcaagcgcgatgaatgtcttactacggagcaagttcccgaggtaatcggagtccggctgatgttgggagtaggtggctacgtctccgaactcacgaccgaaaagatcaagagcagcccgcatggatttgacttggtcagggccgagcctacatgtgcgaatgatgcccatacttgagccacctaactttgttttagggcgactgccctgctgcgtaacatcgttgctgctgcgtaacatcgttgctgctccataacatcaaacatcgacccacggcgtaacgcgcttgctgcttggatgcccgaggcatagactgtacaaaaaaacagtcataacaagccatgaaaaccgccactgcgccgttaccaccgctgcgttcggtcaaggttctggaccagttgcgtgagcgcatacgctacttgcattacagtttacgaaccgaacaggcttatgtcaactgggttcgtgccttcatccgtttccacggtgtgcgtcacccggcaaccttgggcagcagcgaagtcgaggcatttctgtcctggctggcgaacgagcgcaaggtttcggtctccacgcatcgtcaggcattggcggccttgctgttcttctacggcaaggtgctgtgcacggatctgcccttgcttcaggagatcggtagacctcggccgtcgcggcgcttgccggtggtgctgaccccggatgaagtggttcgcatcctcggttttctggaaggcgagcatcgtttgttcgcccaggactctagctatagttctagtggttggctacagctttgtttgtactatcaacaggttgaactgctgatcaacagatcctctacgcggccgcggtaccataacttcgtatagcatacattatacgaagttatctggtttaaacgtacccgtagtggctatggcagggcttgccgccccgacgttggctgcgagccctgggccttcacccgaacttgggggttggggtggggaaaaggaagaaacgcgggcgtattggtcccaatggggtctcggtggggtatcgacagagtgccagccctgggaccgaaccccgcgtttatgaacaaacgacccaacacccgtgcgttttattctgtctttttattgccgtcatagcgcgggttccttccggtattgtctccttccgtgtttcagttagcctcccccatctcccggtaccgcatgctatgcatcagctgctagcaccatggctcgagatcccgggtgatcaagtcttcgtcgagtgattgtaaataaaatgtaatttacagtatagtattttaattaatatacaaatgatttgataataattcttatttaactataatatattgtgttgggttgaattaaaggtccgtatactagtatcgattcgcgacctactccggaatattaatagatcatggagataattaaaatgataaccatctcgcaaataaataagtattttactgttttcgtaacagttttgtaataaaaaaacctataaatattccggattattcataccgtcccaccatcgggcgcggatcccggtccgaagcgcgcggaattcaaaggcctacgtcgacgccaccatggaatcccgtatctggtgcctggtcgtgtgcgtgaacctgtgcatcgtgtgcctgggtgctgctgtgtcctcctcctccacccgtggcacctccgctacccactcccaccactcctcccacaccacctccgccgctcactcccgttccggttccgtgtcccagcgtgtgacctcctcccagaccgtgtcccacggtgtcaacgagactatctacaacaccaccctgaagtacggcgacgtcgtgggtgtcaacaccaccaagtacccctaccgtgtgtgctccatggctcagggcaccgacctgatccgtttcgagcgtaacatcgtgtgcacctccatgaagcccatcaacgaggacctggacgagggtatcatggtggtgtacaagcgcaacatcgtggctcacaccttcaaggtccgcgtgtaccagaaggtgctgaccttccgtcgttcctacgcttacatccacaccacttacctgctgggttccaacaccgagtacgtggcccctcccatgtgggagatccaccacatcaactcccactcccagtgctactcctcttactcccgtgtgatcgctggcaccgtgttcgtggcttaccaccgtgactcctacgagaacaagaccatgcagctgatgcccgacgactactccaacacccactccacccgttacgtgaccgtgaaggaccagtggcactcccgtggttccacctggctgtaccgtgaaacctgcaacctgaactgcatggtcaccatcaccaccgctcgttccaagtacccttaccacttcttcgctacctccaccggcgacgtggtggacatctcccccttctacaacggtactaaccgtaacgcttcctacttcggcgagaacgctgacaagttcttcatcttccccaactacaccatcgtgtccgacttcggtcgtcccaactccgctctggaaacccaccgtctggtggctttcttggagcgtgctgactccgtgatctcctgggacatccaggacgagaagaacgtgacctgccagctgaccttctgggaggcttccgagcgtaccatccgttccgaggctgaggactcctaccacttctccagcgctaagatgaccgctaccttcctgtccaagaaacaagaggtcaacatgtccgactccgccctggactgcgtgcgtgacgaggctatcaacaagctgcagcagatcttcaacacctcctacaaccagacctacgagaagtacggaaacgtgtccgtgttcgagactaccggtggcctggtggtgttctggcagggtatcaagcagaagtccctggtcgagctggaacgtctggctaaccgttcctccctgaacctgacccacaaccgtaccaagcgttccaccgacggcaacaacgctactcacctgtccaacatggaatccgtgcacaacctggtgtacgctcagctgcagttcacctacgacaccctgcgcggttacatcaaccgtgctctggctcagatcgctgaggcttggtgcgtggaccagcgtcgtaccctggaagtgttcaaggaactgtccaagatcaacccctccgctatcctgtccgccatctacaacaagcctatcgctgctcgtttcatgggcgacgtgctgggcctggcttcctgcgtgaccatcaaccagacttccgtgaaggtgctgcgtgacatgaacgtgaaggaatcccccggtcgttgctactcccgtcccgtggtcatcttcaacttcgctaactcctcctacgtgcagtacggccagctgggcgaggacaacgagatcctgctgggcaaccaccgtaccgaggaatgccagctgccctccctgaagatcttcatcgctggcaactccgcttacgaatacgtggactacctgttcaagcgcatgatcgacctgtcctccatctctaccgtggactccatgatcgctctggacatcgaccccctggaaaacaccgacttccgtgtgctggaactgtactcccagaaggaactgcgttccatcaacgtgttcgacctggaagagatcatgcgcgagttcaactcctacaagcagcgtgttaagtacgtcgaggacaaggtggtggaccccctgcccccctacctgaagggactggacgacctgatgtccggcctgggagctgccggcaaggctgtgggtgtcgctatcggtgctgtgggtggtgctgtggcttccgtggtcgagggtgtcgccaccttcctgaagaaccccttcggtgctttcaccatcatcctggtggctatcgctgtggtcatcatcatctacctgatctacacccgtcagcgtcgtctgtgcatgcagcccctgcagaacctgttcccctacctggtgtccgctgacggtactaccgtgacctccggcaacaccaaggacacctccctgcaggctcccccatcctacgaggaatccgtctacaactccggtcgcaagggtcccggtcccccttcctccgacgcttctaccgctgctcccccatacaccaacgagcaggcttaccagatgctgctggctctcgtgcgtctggacgctgagcagcgtgcacagcagaacggcaccgactccctggacggccagaccggaacccaggacaagggccagaagcccaacctgctggaccgtctgcgtcaccgcaagaacggttaccgtcacctgaaggactccgacgaggaagagaacgtctaaggcgcgccaagcttgtcgagaagtactagaggatcataatcagccataccacatttgtagaggttttacttgctttaaaaaacctcccacacctccccctgaacctgaaacataaaatgaatgcaattgttgttgttaacttgtttattgcagcttataatggttacaaataaagcaatagcatcacaaatttcacaaataaagcatttttttcactgcattctagttgtggtttgtccaaactcatcaatgtatcttatcatgtctggatctgatcactgcttgagcctagaagatccggctgctaacaaagcccgaaaggaagctgagttggctgctgccaccgctgagcaataactatcataacccctaggagatccgaaccagataagtgaaatctagttccaaactattttgtcatttttaattttcgtattagcttacgacgctacacccagttcccatctattttgtcactcttccctaaataatccttaaaaactccatttccacccctcccagttcccaactattttgtccgcccaca

SEQ ID NO: 9 - DNA, 11317 bp, Artificial Sequence
  Synthetic construct
ttgttccagtttggaacaagagtccactattaaagaacgtggactccaacgtcaaagggcgaaaaaccgtctatcagggcgatggcccactacgtgaaccatcaccctaatcaagttttttggggtcgaggtgccgtaaagcactaaatcggaaccctaaagggagcccccgatttagagcttgacggggaaagccggcgaacgtggcgagaaaggaagggaagaaagcgaaaggagcgggcgctagggcgctggcaagtgtagcggtcacgctgcgcgtaaccaccacacccgccgcgcttaatgcgccgctacagggcgcgtccattcgccattcaggctgcgcaactgttgggaagggcgatcggtgcgggcctcttcgctattacgccagctggcgaaagggggatgtgctgcaaggcgattaagttgggtaacgccagggttttcccagtcacgacgttgtaaaacgacggccagtgcatagaccagccgcgtaacctggcaaaatcggttacggttgagtaataaatggatgccctgcgtaagcgggtgtgggcggacaataaagtcttaaactgaacaaaatagatctaaactatgacaataaagtcttaaactagacagaatagttgtaaactgaaatcagtccagttatgctgtgaaaaagcatactggacttttgttatggctaaagcaaactcttcattttctgaagtgcaaattgcccgtcgtattaaagaggggcgtggccaagggcatggtaaagactatattcgcggcgttgtgacaatttaccgaacaactccgcggccgggaagccgatctcggcttgaacgaattgttaggtggcggtacttgggtcgatatcaaagtgcatcacttcttcccgtatgcccaactttgtatagagagccactgcgggatcgtcaccgtaatctgcttgcacgtagatcacataagcaccaagcgcgttggcctcatgcttgaggagattgatgagcgcggtggcaatgccctgcctccggtgctcgccggagactgcgagatcatagatatagatctcactacgcggctgctcaaacttgggcagaacgtaagccgcgagagcgccaacaaccgcttcttggtcgaaggcagcaagcgcgatgaatgtcttactacggagcaagttcccgaggtaatcggagtccggctgatgttgggagtaggtggctacgtctccgaactcacgaccgaaaagatcaagagcagcccgcatggatttgacttggtcagggccgagcctacatgtgcgaatgatgcccatacttgagccacctaactttgttttagggcgactgccctgctgcgtaacatcgttgctgctgcgtaacatcgttgctgctccataacatcaaacatcgacccacggcgtaacgcgcttgctgcttggatgcccgaggcatagactgtacaaaaaaacagtcataacaagccatgaaaaccgccactgcgccgttaccaccgctgcgttcggtcaaggttctggaccagttgcgtgagcgcatacgctacttgcattacagtttacgaaccgaacaggcttatgtcaactgggtttgtgccttcatccgtttccacggtgtgcgtcacccggcaaccttgggcagcagcgaagtcgaggcatttctgtcctggctggcgaacgagcgcaaggtttcggtctccacgcatcgtcaggcattggcggccttgctgttcttctacggcaaggtgctgtgcacggatctgcccttgcttcaggagatcggtagacctcggccgtcgcggcgcttgccggtggtgctgaccccggatgaagtggttcgcatcctcggttttctggaaggcgagcatcgtttgttcgcccaggactctagctatagttctagtggttggctacagctttgtttgtactatcaacaggttgaactgctgatcaacagatcctctacgcggccgcggtaccataacttcgtatagcatacattatacgaagttatctggttttactagtatcgattcgcgacctactccggaatattaatagatcatggagataattaaaatgataaccatctcgcaaataaataagtattttactgttttcgtaacagttttgtaataaaaaaacctataaatattccggattattcataccgtcccaccatcgggcgcggatccgccaccatgcgtcccggcctgccctcctacctgatcgtgctggctgtgtgcctgctgtcccacctcctgtcctcccgttacggtgctgaggctatctccgagcccctggacaaggctttccacctcctgctgaacacctacggtcgtcctatccgtttcctgcgcgagaacaccacccagtgcacctacaactcctccctgcgcaactccaccgtcgtccgcgagaacgctatctccttcaacttcttccagtcctacaaccagtactacgtgttccacatgccccgttgcctgttcgctggtcccctggctgagcagttcctgaaccaggtggacctgaccgagactctcgagcgttaccagcagcgtctgaacacttacgctctggtgtccaaggacctggcttcctaccgttccttcagccagcagctgaaggctcaggactccctgggcgagcagcccaccactgtgcctccccctatcgacctgtccatcccccacgtgtggatgcccccccagaccactcctcacggctggaccgagtcccacaccacctccggactgcaccgtccccacttcaaccagacctgcatcctgttcgacggtcacgacctgctgttctccaccgtgaccccctgcctgcaccagggcttctacctcatcgacgagctgcgttacgtgaagatcaccctgaccgaggatttcttcgtggtcaccgtgtccatcgacgacgacacccccatgctgctgatcttcggtcacctcccccgtgtgctgttcaaggctccctaccagcgtgacaacttcatcctgcgtcagaccgagaagcacgagctgctggtgctggtcaagaaggaccagctgaaccgtcactcttacctgaaggaccccgacttcctggacgctgctctggacttcaactacctggacctgtccgctctgctgaggaactccttccaccgttacgctgtggacgtgctgaagtccggtcgttgccagatgctggaccgtcgtaccgtcgagatggctttcgcttacgccctggctctgttcgctgctgctcgtcaagaagaggctggcgctcaggtgtccgtgccccgtgctctggaccgtcaggctgctctgctgcagatccaagagttcatgatcacttgcctgtcccagaccccccctcgtaccaccctgctgctgtaccccaccgctgtggacctggctaagcgtgctctgtggacccccaaccagatcaccgacatcacctccctcgtgcgtctggtgtacatcctgtccaagcagaaccagcagcacctgatcccccagtgggctctgcgtcagatcgctgacttcgctctgaagctgcacaagacccacctggcttcattcctcagcgctttcgctcgccaagagctgtacctgatgggttccctggtgcactccatgctggtgcacaccaccgagcgtcgcgagatcttcatcgtggaaaccggcctgtgctccctggccgagctgtcccacttcacccagctgctggctcacccccaccacgagtacctgtccgacctgtacaccccctgctcctcttccggtcgtcgtgaccactccctggaacgtctgacccgtctgttccccgacgctaccgtgcctaccaccgtgcctgctgctctgtccatcctgtctaccatgcagccctccaccctggaaaccttccccgacctgttctgcctgcctctgggcgagtccttctccgctctgaccgtgtccgagcacgtgtcctacgtggtcaccaaccagtacctgatcaagggcatctcctaccccgtgtccaccaccgtcgtgggccagtccctgatcatcacccagaccgactcccagaccaagtgcgagctgacccgtaacatgcacaccactcactccatcaccgctgctctgaacatctccctcgagaactgcgctttctgccagtccgctctgttggagtacgacgacactcagggtgtcatcaacatcatgtacatgcacgactccgacgacgtgctgttcgctctggacccctacaacgaggtggtggtgtcctccccccgtacccactacctgatgctgctgaagaacggcaccgtgctggaagtgaccgacgtggtggtggacgctaccgaccgtctgctgatgatgtccgtgtacgctctgtccgctatcatcggcatctacctgctgtaccgtatgctgaagacctgctaaggcgccaagctttgtcgagaagtactagaggatcataatcagccataccacatttgtagaggttttacttgctttaaaaaacctcccacacctccccctgaacctgaaacataaaatgaatgcaattgttgttgttaacttgtttattgcagcttataatggttacaaataaagcaatagcatcacaaatttcacaaataaagcatttttttcactgcattctagttgtggtttgtccaaactcatcaatgtatcttatcatgtctggatctgatcactgcttgagcctagaagatccggctgctaacaaagcccgaaaggaagctgagttggctgctgccaccgctgagcaataactatcataacccctaggggcctctaaacgggtcttgaggggttttttgctgaaaggaggaactatatccggatctgaacaggagggacagctgatagaaacagaagccactggagcacctcaaaaacaccatcatacactaaatcagtaagttggcagcatcacccgacgcactttgcgccgaataaatacctgtgacggaagatcacttcgcagaataaataaatcctggtgtccctgttgataccgggaagccctgggccaacttttggcgaaaatgagacgttgatcggcacgtaagaggttccaactttcaccataatgaaataagatcactaccgggcgtattttttgagttatcgagattttcaggagctaaggaagctaaaatggagaaaaaaatcactggatataccaccgttgatatatcccaatggcatcgtaaagaacattttgaggcatttcagtcagttgctcaatgtacctataaccagaccgttcagctggatattacggcctttttaaagaccgtaaagaaaaataagcacaagttttatccggcctttattcacattcttgcccgcctgatgaatgctcatccggaattccgtatggcaatgaaagacggtgagctggtgatatgggatagtgttcacccttgttacaccgttttccatgagcaaactgaaacgttttcatcgctctggagtgaataccacgacgatttccggcagtttctacacatatattcgcaagatgtggcgtgttacggtgaaaacctggcctatttccctaaagggtttattgagaatatgtttttcgtctcagccaatccctgggtgagtttcaccagttttgatttaaacgtggccaatatggacaacttcttcgcccccgttttcaccatgggcaaatattatacgcaaggcgacaaggtgctgatgccgctggcgattcaggttcatcatgccgtttgtgatggcttccatgtcggcagaatgcttaatgaattacaacagtactgcgatgagtggcagggcggggcgtaatttttttaaggcagttattggtgcccttaaacgcctggttgctacgcctgaataagtgataataagcggatgaatggcagaaattcgaaagcaaattcgacccggtcgtcggttcagggcagggtcgttaaatagccgcttatgtctattgctggtttaccggtttattgactaccggaagcagtgtgaccgtgtgcttctcaaatgcctgaggccagtttgctcaggctctccccgtggaggtaataattgacgatatgatcatttattctgcctcccagctgacattcatccggggtcagcaccgtttctgcggactggctttctacgtgttccgcttcctttagcagcccttgcgccctgagtgcttgcggcagcgtgaagctaattctgtcagccgttaagtgttcctgtgtcactcaaaattgctttgagaggctctaagggcttctcagtgcgttacatccctggcttgttgtccacaaccgttaaaccttaaaagctttaaaagccttatatattcttttttttcttataaaacttaaaaccttagaggctatttaagttgctgatttatattaattttattgttcaaacatgagagcttagtacgtgaaacatgagagcttagtacgttagccatgagagcttagtacgttagccatgagggtttagttcgttaaacatgagagcttagtacgttaaacatgagagcttagtacgtgaaacatgagagcttagtacgtactatcaacaggttgaactgctgatcaacagatcctctacgcggccgcggtaccataacttcgtatagcatacattatacgaagttatctggtttaaacgtacccgtagtggctatggcagggcttgccgccccgacgttggctgcgagccctgggccttcacccgaacttgggggttggggtggggaaaaggaagaaacgcgggcgtattggtcccaatggggtctcggtggggtatcgacagagtgccagccctgggaccgaaccccgcgtttatgaacaaacgacccaacacccgtgcgttttattctgtctttttattgccgtcatagcgcgggttccttccggtattgtctccttccgtgtttcagttagcctcccccatctcccggtaccgcatgctatgcatcagctgctagcttagcgagcgtccacagcctggggaccgtaacgggagtgagcgggcaggttcacacgggtctgcttcagctcagggggcaggccagcgtagtacttgtccaggtgacgcagcaggggggggtccagctggtgacgcaggcagaattccttcacagcgttgtacaggccgtagaacagggtgataccctcgggagcagcagcggtggacacgggcagacgcacagcacggttggtacgggtagcctcgttacggatagccaccaccacgttgaacagggaggggggcaccagctcgaaacccagcacgtgttcggtgaagatggaacgaccgtaggacagacgagtcaggtcgtaaccacggcacaggtcgtccacgcaagtgtacacagcgggggaaccgtcgccgcactcggagtaaccgcgcatcacggtcatccaacggggagcggtgtcggaggacagcagggtcagcagagcacgcagctggtcggggttgttgtacagcagggccagggtgtccaggaaagcgtcgtccagcagcacggagttagcagcctcgggggtcacgggacggtaacggatcagctgggacaggggaccgtccctacgggtcacgttgaccaggggacgcagccaggactcgtacttgtcgccctggaacacctctcccagcaggcaacgacgggtcagctcggggcactcagcgggcaccttctcagccacggtgggagccacggacacggtagcggaggacacgatgggcagcagcaggcagcaccacagcagagccacgggaccgggggagaaggagaaaccgcagtcgggacgacggcacatggtggctcgagatcccgggtgatcaagtcttcgtcgagtgattgtaaataaaatgtaatttacagtatagtattttaattaatatacaaatgatttgataataattcttatttaactataatatattgtgttgggttgaattaaaggtccgtatactagtatcgattcgcgacctactccggaatattaatagatcatggagataattaaaatgataaccatctcgcaaataaataagtattttactgttttcgtaacagttttgtaataaaaaaacctataaatattccggattattcataccgtcccaccatcgggcgcggatccgccaccatgtcccccaagaacctgacccccttcctgaccgctctgtggctgctgctgggccactcccgtgtgcctcgtgtgcgtgctgaggaatgctgcgagttcatcaacgtgaaccacccccccgagcgctgctacgacttcaagatgtgcaaccgtttcaccgtggctctgcgttgccccgacggcgaagtgtgctactcccccgaaaagaccgctgagatccgtggtatcgtgaccaccatgacccactccctgacccgtcaggtggtgcacaacaagctgacctcttgcaactacaaccccctgtacctcgaggctgacggtcgtatccgttgcggcaaggtcaacgacaaggctcagtacctgctgggtgctgctggttccgtgccctaccgttggatcaacctcgagtacgacaagatcacccgtatcgtgggcctggaccagtacctcgagtccgtgaagaagcacaagcgtctggacgtgtgccgtgctaagatgggttacatgctgcagtaaaagcttgtcgagaagtactagaggatcataatcagccataccacatttgtagaggttttacttgctttaaaaaacctcccacacctccccctgaacctgaaacataaaatgaatgcaattgttgttgttaacttgtttattgcagcttataatggttacaaataaagcaatagcatcacaaatttcacaaataaagcatttttttcactgcattctagttgtggtttgtccaaactcatcaatgtatcttatcatgtctggatctgatcactgcttgagcctagaagatccggctgctaacaaagcccgaaaggaagctgagttggctgctgtggctagctttgtttaactttaagaaggagatacatctagaccggaatattaatagatcatggagataattaaaatgataaccatctcgcaaataaataagtattttactgttttcgtaacagttttgtaataaaaaaacctataaatattccggattattcataccgtcccaccatcgggcgcggatccgccaccatgctgcgtctgctgctgcgtcaccacttccactgcctgctgctgtgcgctgtgtgggctaccccctgcctggcttccccttggtccaccctgaccgctaaccagaacccctccccaccctggtccaagctgacctactccaagccccacgacgctgctaccttctactgccccttcctgtacccatccccccctcgttccccactgcagttctccggtttccagcgtgtgctgaccggtcccgagtgccgtaacgagactctgtacctgctgtacaaccgcgagggccagaccctggtcgagaggtcctccacctgggtcaagaaggtcatctggtacttgtccggtcgtaaccagaccatcctgcagcgtatgccccgtaccgcttccaagccctccgacggcaacgtgcagatctccgtcgaggacgctaagatcttcggtgctcacatggtgcccaagcagaccaagctgctgcgtttcgtggtcaacgacggcacccgttaccagatgtgcgtgatgaagctcgagtcctgggctcacgtgttccgtgactactccgtgtccttccaagtgcgcctgaccttcaccgaggctaacaaccagacctacaccttctgcacccaccccaacctgatcgtgtaaaagcttgtcgagaagtactagaggatcataatcagccataccacatttgtagaggttttacttgctttaaaaaacctcccacacctccccctgaacctgaaacataaaatgaatgcaattgttgttgttaacttgtttattgcagcttataatggttacaaataaagcaatagcatcacaaatttcacaaataaagcatttttttcactgcattctagttgtggtttgtccaaactcatcaatgtatcttatcatgtctggatctgatcactgcttgagcctagaagatccggctgctaacaaagcccgaaaggaagctgagttggctgctgggtgcctaatgagtgagctaactcacattaattgcccggaatattaatagatcatggagataattaaaatgataaccatctcgcaaataaataagtattttactgttttcgtaacagttttgtaataaaaaaacctataaatattccggattattcataccgtcccaccatcgggcgcggatccgccaccatgcgtctgtgccgtgtgtggctgtccgtgtgcctgtgcgctgtggtgctgggccagtgccagcgtgaaaccgctgagaagaacgactactaccgtgtgccccactactgggacgcttgctcccgtgctctgcccgaccagacccgttacaagtacgtcgagcagctggtggacctgaccctgaactaccactacgacgcttcccacggcctggacaacttcgacgtgctgaagcgtatcaacgtgaccgaggtgtccctgctgatctccgacttccgtcgtcagaaccgtcgtggtggcaccaacaagcgtaccaccttcaacgctgctggttccctggctccccacgctcgttccctcgagttctccgtgcgtctgttcgctaactaaaagcttgtcgagaagtactagaggatcataatcagccataccacatttgtagaggttttacttgctttaaaaaacctcccacacctccccctgaacctgaaacataaaatgaatgcaattgttgttgttaacttgtttattgcagcttataatggttacaaataaagcaatagcatcacaaatttcacaaataaagcatttttttcactgcattctagttgtggtttgtccaaactcatcaatgtatcttatcatgtctggatctgatcactgcttgagcctagaagatccggctgctaacaaagcccgaaaggaagctgagttggctgctgccaccgctgagcaataactatcataacccctaggagatccgaaccagataagtgaaatctagttccaaactattttgtcatttttaattttcgtattagcttacgacgctacacccagttcccatctattttgtcactcttccctaaataatccttaaaaactccatttccacccctcccagttcccaactattttgtccgcccaca

SEQ ID NO: 10 - DNA, 11317 bp, Artificial Sequence
  Synthetic construct
ttgttccagtttggaacaagagtccactattaaagaacgtggactccaacgtcaaagggcgaaaaaccgtctatcagggcgatggcccactacgtgaaccatcaccctaatcaagttttttggggtcgaggtgccgtaaagcactaaatcggaaccctaaagggagcccccgatttagagcttgacggggaaagccggcgaacgtggcgagaaaggaagggaagaaagcgaaaggagcgggcgctagggcgctggcaagtgtagcggtcacgctgcgcgtaaccaccacacccgccgcgcttaatgcgccgctacagggcgcgtccattcgccattcaggctgcgcaactgttgggaagggcgatcggtgcgggcctcttcgctattacgccagctggcgaaagggggatgtgctgcaaggcgattaagttgggtaacgccagggttttcccagtcacgacgttgtaaaacgacggccagtgcatagaccagccgcgtaacctggcaaaatcggttacggttgagtaataaatggatgccctgcgtaagcgggtgtgggcggacaataaagtcttaaactgaacaaaatagatctaaactatgacaataaagtcttaaactagacagaatagttgtaaactgaaatcagtccagttatgctgtgaaaaagcatactggacttttgttatggctaaagcaaactcttcattttctgaagtgcaaattgcccgtcgtattaaagaggggcgtggccaagggcatggtaaagactatattcgcggcgttgtgacaatttaccgaacaactccgcggccgggaagccgatctcggcttgaacgaattgttaggtggcggtacttgggtcgatatcaaagtgcatcacttcttcccgtatgcccaactttgtatagagagccactgcgggatcgtcaccgtaatctgcttgcacgtagatcacataagcaccaagcgcgttggcctcatgcttgaggagattgatgagcgcggtggcaatgccctgcctccggtgctcgccggagactgcgagatcatagatatagatctcactacgcggctgctcaaacttgggcagaacgtaagccgcgagagcgccaacaaccgcttcttggtcgaaggcagcaagcgcgatgaatgtcttactacggagcaagttcccgaggtaatcggagtccggctgatgttgggagtaggtggctacgtctccgaactcacgaccgaaaagatcaagagcagcccgcatggatttgacttggtcagggccgagcctacatgtgcgaatgatgcccatacttgagccacctaactttgttttagggcgactgccctgctgcgtaacatcgttgctgctgcgtaacatcgttgctgctccataacatcaaacatcgacccacggcgtaacgcgcttgctgcttggatgcccgaggcatagactgtacaaaaaaacagtcataacaagccatgaaaaccgccactgcgccgttaccaccgctgcgttcggtcaaggttctggaccagttgcgtgagcgcatacgctacttgcattacagtttacgaaccgaacaggcttatgtcaactgggtttgtgccttcatccgtttccacggtgtgcgtcacccggcaaccttgggcagcagcgaagtcgaggcatttctgtcctggctggcgaacgagcgcaaggtttcggtctccacgcatcgtcaggcattggcggccttgctgttcttctacggcaaggtgctgtgcacggatctgcccttgcttcaggagatcggtagacctcggccgtcgcggcgcttgccggtggtgctgaccccggatgaagtggttcgcatcctcggttttctggaaggcgagcatcgtttgttcgcccaggactctagctatagttctagtggttggctacagctttgtttgtactatcaacaggttgaactgctgatcaacagatcctctacgcggccgcggtaccataacttcgtatagcatacattatacgaagttatctggttttactagtatcgattcgcgacctactccggaatattaatagatcatggagataattaaaatgataaccatctcgcaaataaataagtattttactgttttcgtaacagttttgtaataaaaaaacctataaatattccggattattcataccgtcccaccatcgggcgcggatccgccaccatgcgtcccggcctgccctcctacctgatcgtgctggctgtgtgcctgctgtcccacctcctgtcctcccgttacggtgctgaggctatctccgagcccctggacaaggctttccacctcctgctgaacacctacggtcgtcctatccgtttcctgcgcgagaacaccacccagtgcacctacaactcctccctgcgcaactccaccgtcgtccgcgagaacgctatctccttcaacttcttccagtcctacaaccagtactacgtgttccacatgccccgttgcctgttcgctggtcccctggctgagcagttcctgaaccaggtggacctgaccgagactctcgagcgttaccagcagcgtctgaacacttacgctctggtgtccaaggacctggcttcctaccgttccttcagccagcagctgaaggctcaggactccctgggcgagcagcccaccactgtgcctccccctatcgacctgtccatcccccacgtgtggatgcccccccagaccactcctcacggctggaccgagtcccacaccacctccggactgcaccgtccccacttcaaccagacctgcatcctgttcgacggtcacgacctgctgttctccaccgtgaccccctgcctgcaccagggcttctacctcatcgacgagctgcgttacgtgaagatcaccctgaccgaggatttcttcgtggtcaccgtgtccatcgacgacgacacccccatgctgctgatcttcggtcacctcccccgtgtgctgttcaaggctccctaccagcgtgacaacttcatcctgcgtcagaccgagaagcacgagctgctggtgctggtcaagaaggaccagctgaaccgtcactcttacctgaaggaccccgacttcctggacgctgctctggacttcaactacctggacctgtccgctctgctgaggaactccttccaccgttacgctgtggacgtgctgaagtccggtcgttgccagatgctggaccgtcgtaccgtcgagatggctttcgcttacgccctggctctgttcgctgctgctcgtcaagaagaggctggcgctcaggtgtccgtgccccgtgctctggaccgtcaggctgctctgctgcagatccaagagttcatgatcacttgcctgtcccagaccccccctcgtaccaccctgctgctgtaccccaccgctgtggacctggctaagcgtgctctgtggacccccaaccagatcaccgacatcacctccctcgtgcgtctggtgtacatcctgtccaagcagaaccagcagcacctgatcccccagtgggctctgcgtcagatcgctgacttcgctctgaagctgcacaagacccacctggcttcattcctcagcgctttcgctcgccaagagctgtacctgatgggttccctggtgcactccatgctggtgcacaccaccgagcgtcgcgagatcttcatcgtggaaaccggcctgtgctccctggccgagctgtcccacttcacccagctgctggctcacccccaccacgagtacctgtccgacctgtacaccccctgctcctcttccggtcgtcgtgaccactccctggaacgtctgacccgtctgttccccgacgctaccgtgcctaccaccgtgcctgctgctctgtccatcctgtctaccatgcagccctccaccctggaaaccttccccgacctgttctgcctgcctctgggcgagtccttctccgctctgaccgtgtccgagcacgtgtcctacgtggtcaccaaccagtacctgatcaagggcatctcctaccccgtgtccaccaccgtcgtgggccagtccctgatcatcacccagaccgactcccagaccaagtgcgagctgacccgtaacatgcacaccactcactccatcaccgctgctctgaacatctccctcgagaactgcgctttctgccagtccgctctgttggagtacgacgacactcagggtgtcatcaacatcatgtacatgcacgactccgacgacgtgctgttcgctctggacccctacaacgaggtggtggtgtcctccccccgtacccactacctgatgctgctgaagaacggcaccgtgctggaagtgaccgacgtggtggtggacgctaccgaccgtctgctgatgatgtccgtgtacgctctgtccgctatcatcggcatctacctgctgtaccgtatgctgaagacctgctaaggcgccaagctttgtcgagaagtactagaggatcataatcagccataccacatttgtagaggttttacttgctttaaaaaacctcccacacctccccctgaacctgaaacataaaatgaatgcaattgttgttgttaacttgtttattgcagcttataatggttacaaataaagcaatagcatcacaaatttcacaaataaagcatttttttcactgcattctagttgtggtttgtccaaactcatcaatgtatcttatcatgtctggatctgatcactgcttgagcctagaagatccggctgctaacaaagcccgaaaggaagctgagttggctgctgccaccgctgagcaataactatcataacccctaggggcctctaaacgggtcttgaggggttttttgctgaaaggaggaactatatccggatctgaacaggagggacagctgatagaaacagaagccactggagcacctcaaaaacaccatcatacactaaatcagtaagttggcagcatcacccgacgcactttgcgccgaataaatacctgtgacggaagatcacttcgcagaataaataaatcctggtgtccctgttgataccgggaagccctgggccaacttttggcgaaaatgagacgttgatcggcacgtaagaggttccaactttcaccataatgaaataagatcactaccgggcgtattttttgagttatcgagattttcaggagctaaggaagctaaaatggagaaaaaaatcactggatataccaccgttgatatatcccaatggcatcgtaaagaacattttgaggcatttcagtcagttgctcaatgtacctataaccagaccgttcagctggatattacggcctttttaaagaccgtaaagaaaaataagcacaagttttatccggcctttattcacattcttgcccgcctgatgaatgctcatccggaattccgtatggcaatgaaagacggtgagctggtgatatgggatagtgttcacccttgttacaccgttttccatgagcaaactgaaacgttttcatcgctctggagtgaataccacgacgatttccggcagtttctacacatatattcgcaagatgtggcgtgttacggtgaaaacctggcctatttccctaaagggtttattgagaatatgtttttcgtctcagccaatccctgggtgagtttcaccagttttgatttaaacgtggccaatatggacaacttcttcgcccccgttttcaccatgggcaaatattatacgcaaggcgacaaggtgctgatgccgctggcgattcaggttcatcatgccgtttgtgatggcttccatgtcggcagaatgcttaatgaattacaacagtactgcgatgagtggcagggcggggcgtaatttttttaaggcagttattggtgcccttaaacgcctggttgctacgcctgaataagtgataataagcggatgaatggcagaaattcgaaagcaaattcgacccggtcgtcggttcagggcagggtcgttaaatagccgcttatgtctattgctggtttaccggtttattgactaccggaagcagtgtgaccgtgtgcttctcaaatgcctgaggccagtttgctcaggctctccccgtggaggtaataattgacgatatgatcatttattctgcctcccagctgacattcatccggggtcagcaccgtttctgcggactggctttctacgtgttccgcttcctttagcagcccttgcgccctgagtgcttgcggcagcgtgaagctaattctgtcagccgttaagtgttcctgtgtcactcaaaattgctttgagaggctctaagggcttctcagtgcgttacatccctggcttgttgtccacaaccgttaaaccttaaaagctttaaaagccttatatattcttttttttcttataaaacttaaaaccttagaggctatttaagttgctgatttatattaattttattgttcaaacatgagagcttagtacgtgaaacatgagagcttagtacgttagccatgagagcttagtacgttagccatgagggtttagttcgttaaacatgagagcttagtacgttaaacatgagagcttagtacgtgaaacatgagagcttagtacgtactatcaacaggttgaactgctgatcaacagatcctctacgcggccgcggtaccataacttcgtatagcatacattatacgaagttatctggtttaaacgtacccgtagtggctatggcagggcttgccgccccgacgttggctgcgagccctgggccttcacccgaacttgggggttggggtggggaaaaggaagaaacgcgggcgtattggtcccaatggggtctcggtggggtatcgacagagtgccagccctgggaccgaaccccgcgtttatgaacaaacgacccaacacccgtgcgttttattctgtctttttattgccgtcatagcgcgggttccttccggtattgtctccttccgtgtttcagttagcctcccccatctcccggtaccgcatgctatgcatcagctgctagcttagcgagcgtccacagcctggggaccgtaacgggagtgagcgggcaggttcacacgggtctgcttcagctcagggggcaggccagcgtagtacttgtccaggtgacgcagcaggggggggtccagctggtgacgcaggcagaattccttcacagcgttgtacaggccgtagaacagggtgataccctcgggagcagcagcggtggacacgggcagacgcacagcacggttggtacgggtagcctcgttacggatagccaccaccacgttgaacagggaggggggcaccagctcgaaacccagcacgtgttcggtgaagatggaacgaccgtaggacagacgagtcaggtcgtaaccacggcacaggtcgtccacgcaagtgtacacagcgggggaaccgtcgccgcactcggagtaaccgcgcatcacggtcatccaacggggagcggtgtcggaggacagcagggtcagcagagcacgcagctggtcggggttgttgtacagcagggccagggtgtccaggaaagcgtcgtccagcagcacggagttagcagcctcgggggtcacgggacggtaacggatcagctgggacaggggaccgtccctacgggtcacgttgaccaggggacgcagccaggactcgtacttgtcgccctggaacacctctcccagcaggcaacgacgggtcagctcggggcactcagcgggcaccttctcagccacggtgggagccacggacacggtagcggaggacacgatgggcagcagcaggcagcaccacagcagagccacgggaccgggggagaaggagaaaccgcagtcgggacgacggcacatggtggctcgagatcccgggtgatcaagtcttcgtcgagtgattgtaaataaaatgtaatttacagtatagtattttaattaatatacaaatgatttgataataattcttatttaactataatatattgtgttgggttgaattaaaggtccgtatactagtatcgattcgcgacctactccggaatattaatagatcatggagataattaaaatgataaccatctcgcaaataaataagtattttactgttttcgtaacagttttgtaataaaaaaacctataaatattccggattattcataccgtcccaccatcgggcgcggatccgccaccatgaactccaaggacctgacccccttcctgaccaccctgtggctgctgctggaccactcccgtgtgcctcgtgtgcgtgctgaggaatgctgcgaagtgatcaacgtgaaccacccccccgagcgctgctacgacttcaagatgtgcaacctgttcaccgtggctctgcgttgccccgacggcgaagtgtgctactcccccgaaaagaccgctgagatccgtggtatcgtgaccaccatgacccactccctgacccgtcaagtgatccacaacaagctgaccagctgcaactacaaccccctgtacctcgaggctgacggtcgtatccgttgcggcaaggtgtccgacaaggctcagtacctgctgggtgctgctggttccgtgccctaccgttggatcaacctcgagtacgacaagatcacccgtatcgtgggcctggaccagtacctcgagtccgtgaagaagcacaagcgtctggacgtgtgccgtgctaagatgggttacatgctgcagtaaaagcttgtcgagaagtactagaggatcataatcagccataccacatttgtagaggttttacttgctttaaaaaacctcccacacctccccctgaacctgaaacataaaatgaatgcaattgttgttgttaacttgtttattgcagcttataatggttacaaataaagcaatagcatcacaaatttcacaaataaagcatttttttcactgcattctagttgtggtttgtccaaactcatcaatgtatcttatcatgtctggatctgatcactgcttgagcctagaagatccggctgctaacaaagcccgaaaggaagctgagttggctgctgtggctagctttgtttaactttaagaaggagatacatctagaccggaatattaatagatcatggagataattaaaatgataaccatctcgcaaataaataagtattttactgttttcgtaacagttttgtaataaaaaaacctataaatattccggattattcataccgtcccaccatcgggcgcggatccgccaccatgctgcgtctgctgctgcgtcaccacttccactgcctgctgctgtgcgctgtgtgggctaccccctgcctggcttccccttggtccaccctgaccgctaaccagaacccctccccaccctggtccaagctgacctactccaagccccacgacgctgctaccttctactgccccttcctgtacccatccccccctcgttccccactgcagttctccggtttccagcgtgtgctgaccggtcccgagtgccgtaacgagactctgtacctgctgtacaaccgcgagggccagaccctggtcgagaggtcctccacctgggtcaagaaggtcatctggtacttgtccggtcgtaaccagaccatcctgcagcgtatgccccgtaccgcttccaagccctccgacggcaacgtgcagatctccgtcgaggacgctaagatcttcggtgctcacatggtgcccaagcagaccaagctgctgcgtttcgtggtcaacgacggcacccgttaccagatgtgcgtgatgaagctcgagtcctgggctcacgtgttccgtgactactccgtgtccttccaagtgcgcctgaccttcaccgaggctaacaaccagacctacaccttctgcacccaccccaacctgatcgtgtaaaagcttgtcgagaagtactagaggatcataatcagccataccacatttgtagaggttttacttgctttaaaaaacctcccacacctccccctgaacctgaaacataaaatgaatgcaattgttgttgttaacttgtttattgcagcttataatggttacaaataaagcaatagcatcacaaatttcacaaataaagcatttttttcactgcattctagttgtggtttgtccaaactcatcaatgtatcttatcatgtctggatctgatcactgcttgagcctagaagatccggctgctaacaaagcccgaaaggaagctgagttggctgctgggtgcctaatgagtgagctaactcacattaattgcccggaatattaatagatcatggagataattaaaatgataaccatctcgcaaataaataagtattttactgttttcgtaacagttttgtaataaaaaaacctataaatattccggattattcataccgtcccaccatcgggcgcggatccgccaccatgcgtctgtgccgtgtgtggctgtccgtgtgcctgtgcgctgtggtgctgggccagtgccagcgtgaaaccgctgagaagaacgactactaccgtgtgccccactactgggacgcttgctcccgtgctctgcccgaccagacccgttacaagtacgtcgagcagctggtggacctgaccctgaactaccactacgacgcttcccacggcctggacaacttcgacgtgctgaagcgtatcaacgtgaccgaggtgtccctgctgatctccgacttccgtcgtcagaaccgtcgtggtggcaccaacaagcgtaccaccttcaacgctgctggttccctggctccccacgctcgttccctcgagttctccgtgcgtctgttcgctaactaaaagcttgtcgagaagtactagaggatcataatcagccataccacatttgtagaggttttacttgctttaaaaaacctcccacacctccccctgaacctgaaacataaaatgaatgcaattgttgttgttaacttgtttattgcagcttataatggttacaaataaagcaatagcatcacaaatttcacaaataaagcatttttttcactgcattctagttgtggtttgtccaaactcatcaatgtatcttatcatgtctggatctgatcactgcttgagcctagaagatccggctgctaacaaagcccgaaaggaagctgagttggctgctgccaccgctgagcaataactatcataacccctaggagatccgaaccagataagtgaaatctagttccaaactattttgtcatttttaattttcgtattagcttacgacgctacacccagttcccatctattttgtcactcttccctaaataatccttaaaaactccatttccacccctcccagttcccaactattttgtccgcccaca

SEQ ID NO: 11 - DNA, 11363 bp, Artificial Sequence
  Synthetic construct
ttgttccagtttggaacaagagtccactattaaagaacgtggactccaacgtcaaagggcgaaaaaccgtctatcagggcgatggcccactacgtgaaccatcaccctaatcaagttttttggggtcgaggtgccgtaaagcactaaatcggaaccctaaagggagcccccgatttagagcttgacggggaaagccggcgaacgtggcgagaaaggaagggaagaaagcgaaaggagcgggcgctagggcgctggcaagtgtagcggtcacgctgcgcgtaaccaccacacccgccgcgcttaatgcgccgctacagggcgcgtccattcgccattcaggctgcgcaactgttgggaagggcgatcggtgcgggcctcttcgctattacgccagctggcgaaagggggatgtgctgcaaggcgattaagttgggtaacgccagggttttcccagtcacgacgttgtaaaacgacggccagtgcatagaccagccgcgtaacctggcaaaatcggttacggttgagtaataaatggatgccctgcgtaagcgggtgtgggcggacaataaagtcttaaactgaacaaaatagatctaaactatgacaataaagtcttaaactagacagaatagttgtaaactgaaatcagtccagttatgctgtgaaaaagcatactggacttttgttatggctaaagcaaactcttcattttctgaagtgcaaattgcccgtcgtattaaagaggggcgtggccaagggcatggtaaagactatattcgcggcgttgtgacaatttaccgaacaactccgcggccgggaagccgatctcggcttgaacgaattgttaggtggcggtacttgggtcgatatcaaagtgcatcacttcttcccgtatgcccaactttgtatagagagccactgcgggatcgtcaccgtaatctgcttgcacgtagatcacataagcaccaagcgcgttggcctcatgcttgaggagattgatgagcgcggtggcaatgccctgcctccggtgctcgccggagactgcgagatcatagatatagatctcactacgcggctgctcaaacttgggcagaacgtaagccgcgagagcgccaacaaccgcttcttggtcgaaggcagcaagcgcgatgaatgtcttactacggagcaagttcccgaggtaatcggagtccggctgatgttgggagtaggtggctacgtctccgaactcacgaccgaaaagatcaagagcagcccgcatggatttgacttggtcagggccgagcctacatgtgcgaatgatgcccatacttgagccacctaactttgttttagggcgactgccctgctgcgtaacatcgttgctgctgcgtaacatcgttgctgctccataacatcaaacatcgacccacggcgtaacgcgcttgctgcttggatgcccgaggcatagactgtacaaaaaaacagtcataacaagccatgaaaaccgccactgcgccgttaccaccgctgcgttcggtcaaggttctggaccagttgcgtgagcgcatacgctacttgcattacagtttacgaaccgaacaggcttatgtcaactgggtttgtgccttcatccgtttccacggtgtgcgtcacccggcaaccttgggcagcagcgaagtcgaggcatttctgtcctggctggcgaacgagcgcaaggtttcggtctccacgcatcgtcaggcattggcggccttgctgttcttctacggcaaggtgctgtgcacggatctgcccttgcttcaggagatcggtagacctcggccgtcgcggcgcttgccggtggtgctgaccccggatgaagtggttcgcatcctcggttttctggaaggcgagcatcgtttgttcgcccaggactctagctatagttctagtggttggctacagctttgtttgtactatcaacaggttgaactgctgatcaacagatcctctacgcggccgcggtaccataacttcgtatagcatacattatacgaagttatctggttttactagtatcgattcgcgacctactccggaatattaatagatcatggagataattaaaatgataaccatctcgcaaataaataagtattttactgttttcgtaacagttttgtaataaaaaaacctataaatattccggattattcataccgtcccaccatcgggcgcggatccgccaccatgcgtcccggcctgccctcctacctgatcgtgctggctgtgtgcctgctgtcccacctcctgtcctcccgttacggtgctgaggctatctccgagcccctggacaaggctttccacctcctgctgaacacctacggtcgtcctatccgtttcctgcgcgagaacaccacccagtgcacctacaactcctccctgcgcaactccaccgtcgtccgcgagaacgctatctccttcaacttcttccagtcctacaaccagtactacgtgttccacatgccccgttgcctgttcgctggtcccctggctgagcagttcctgaaccaggtggacctgaccgagactctcgagcgttaccagcagcgtctgaacacttacgctctggtgtccaaggacctggcttcctaccgttccttcagccagcagctgaaggctcaggactccctgggcgagcagcccaccactgtgcctccccctatcgacctgtccatcccccacgtgtggatgcccccccagaccactcctcacggctggaccgagtcccacaccacctccggactgcaccgtccccacttcaaccagacctgcatcctgttcgacggtcacgacctgctgttctccaccgtgaccccctgcctgcaccagggcttctacctcatcgacgagctgcgttacgtgaagatcaccctgaccgaggatttcttcgtggtcaccgtgtccatcgacgacgacacccccatgctgctgatcttcggtcacctcccccgtgtgctgttcaaggctccctaccagcgtgacaacttcatcctgcgtcagaccgagaagcacgagctgctggtgctggtcaagaaggaccagctgaaccgtcactcttacctgaaggaccccgacttcctggacgctgctctggacttcaactacctggacctgtccgctctgctgaggaactccttccaccgttacgctgtggacgtgctgaagtccggtcgttgccagatgctggaccgtcgtaccgtcgagatggctttcgcttacgccctggctctgttcgctgctgctcgtcaagaagaggctggcgctcaggtgtccgtgccccgtgctctggaccgtcaggctgctctgctgcagatccaagagttcatgatcacttgcctgtcccagaccccccctcgtaccaccctgctgctgtaccccaccgctgtggacctggctaagcgtgctctgtggacccccaaccagatcaccgacatcacctccctcgtgcgtctggtgtacatcctgtccaagcagaaccagcagcacctgatcccccagtgggctctgcgtcagatcgctgacttcgctctgaagctgcacaagacccacctggcttcattcctcagcgctttcgctcgccaagagctgtacctgatgggttccctggtgcactccatgctggtgcacaccaccgagcgtcgcgagatcttcatcgtggaaaccggcctgtgctccctggccgagctgtcccacttcacccagctgctggctcacccccaccacgagtacctgtccgacctgtacaccccctgctcctcttccggtcgtcgtgaccactccctggaacgtctgacccgtctgttccccgacgctaccgtgcctaccaccgtgcctgctgctctgtccatcctgtctaccatgcagccctccaccctggaaaccttccccgacctgttctgcctgcctctgggcgagtccttctccgctctgaccgtgtccgagcacgtgtcctacgtggtcaccaaccagtacctgatcaagggcatctcctaccccgtgtccaccaccgtcgtgggccagtccctgatcatcacccagaccgactcccagaccaagtgcgagctgacccgtaacatgcacaccactcactccatcaccgctgctctgaacatctccctcgagaactgcgctttctgccagtccgctctgttggagtacgacgacactcagggtgtcatcaacatcatgtacatgcacgactccgacgacgtgctgttcgctctggacccctacaacgaggtggtggtgtcctccccccgtacccactacctgatgctgctgaagaacggcaccgtgctggaagtgaccgacgtggtggtggacgctaccgaccgtctgctgatgatgtccgtgtacgctctgtccgctatcatcggcatctacctgctgtaccgtatgctgaagacctgctaaggcgccaagctttgtcgagaagtactagaggatcataatcagccataccacatttgtagaggttttacttgctttaaaaaacctcccacacctccccctgaacctgaaacataaaatgaatgcaattgttgttgttaacttgtttattgcagcttataatggttacaaataaagcaatagcatcacaaatttcacaaataaagcatttttttcactgcattctagttgtggtttgtccaaactcatcaatgtatcttatcatgtctggatctgatcactgcttgagcctagaagatccggctgctaacaaagcccgaaaggaagctgagttggctgctgccaccgctgagcaataactatcataacccctaggggcctctaaacgggtcttgaggggttttttgctgaaaggaggaactatatccggatctgaacaggagggacagctgatagaaacagaagccactggagcacctcaaaaacaccatcatacactaaatcagtaagttggcagcatcacccgacgcactttgcgccgaataaatacctgtgacggaagatcacttcgcagaataaataaatcctggtgtccctgttgataccgggaagccctgggccaacttttggcgaaaatgagacgttgatcggcacgtaagaggttccaactttcaccataatgaaataagatcactaccgggcgtattttttgagttatcgagattttcaggagctaaggaagctaaaatggagaaaaaaatcactggatataccaccgttgatatatcccaatggcatcgtaaagaacattttgaggcatttcagtcagttgctcaatgtacctataaccagaccgttcagctggatattacggcctttttaaagaccgtaaagaaaaataagcacaagttttatccggcctttattcacattcttgcccgcctgatgaatgctcatccggaattccgtatggcaatgaaagacggtgagctggtgatatgggatagtgttcacccttgttacaccgttttccatgagcaaactgaaacgttttcatcgctctggagtgaataccacgacgatttccggcagtttctacacatatattcgcaagatgtggcgtgttacggtgaaaacctggcctatttccctaaagggtttattgagaatatgtttttcgtctcagccaatccctgggtgagtttcaccagttttgatttaaacgtggccaatatggacaacttcttcgcccccgttttcaccatgggcaaatattatacgcaaggcgacaaggtgctgatgccgctggcgattcaggttcatcatgccgtttgtgatggcttccatgtcggcagaatgcttaatgaattacaacagtactgcgatgagtggcagggcggggcgtaatttttttaaggcagttattggtgcccttaaacgcctggttgctacgcctgaataagtgataataagcggatgaatggcagaaattcgaaagcaaattcgacccggtcgtcggttcagggcagggtcgttaaatagccgcttatgtctattgctggtttaccggtttattgactaccggaagcagtgtgaccgtgtgcttctcaaatgcctgaggccagtttgctcaggctctccccgtggaggtaataattgacgatatgatcatttattctgcctcccagctgacattcatccggggtcagcaccgtttctgcggactggctttctacgtgttccgcttcctttagcagcccttgcgccctgagtgcttgcggcagcgtgaagctaattctgtcagccgttaagtgttcctgtgtcactcaaaattgctttgagaggctctaagggcttctcagtgcgttacatccctggcttgttgtccacaaccgttaaaccttaaaagctttaaaagccttatatattcttttttttcttataaaacttaaaaccttagaggctatttaagttgctgatttatattaattttattgttcaaacatgagagcttagtacgtgaaacatgagagcttagtacgttagccatgagagcttagtacgttagccatgagggtttagttcgttaaacatgagagcttagtacgttaaacatgagagcttagtacgtgaaacatgagagcttagtacgtactatcaacaggttgaactgctgatcaacagatcctctacgcggccgcggtaccataacttcgtatagcatacattatacgaagttatctggtttaaacgtacccgtagtggctatggcagggcttgccgccccgacgttggctgcgagccctgggccttcacccgaacttgggggttggggtggggaaaaggaagaaacgcgggcgtattggtcccaatggggtctcggtggggtatcgacagagtgccagccctgggaccgaaccccgcgtttatgaacaaacgacccaacacccgtgcgttttattctgtctttttattgccgtcatagcgcgggttccttccggtattgtctccttccgtgtttcagttagcctcccccatctccggtaccgcatgctatgcttagtgatggtggtggtgatggtggtggctgcctccccccccagacccccctccgccgcttccgcgagcgtccacagcctggggaccgtaacgggagtgagcgggcaggttcacacgggtctgcttcagctcagggggcaggccagcgtagtacttgtccaggtgacgcagcaggggggggtccagctggtgacgcaggcagaattccttcacagcgttgtacaggccgtagaacagggtgataccctcgggagcagcagcggtggacacgggcagacgcacagcacggttggtacgggtagcctcgttacggatagccaccaccacgttgaacagggaggggggcaccagctcgaaacccagcacgtgttcggtgaagatggaacgaccgtaggacagacgagtcaggtcgtaaccacggcacaggtcgtccacgcaagtgtacacagcgggggaaccgtcgccgcactcggagtaaccgcgcatcacggtcatccaacggggagcggtgtcggaggacagcagggtcagcagagcacgcagctggtcggggttgttgtacagcagggccagggtgtccaggaaagcgtcgtccagcagcacggagttagcagcctcgggggtcacgggacggtaacggatcagctgggacaggggaccgtccctacgggtcacgttgaccaggggacgcagccaggactcgtacttgtcgccctggaacacctctcccagcaggcaacgacgggtcagctcggggcactcagcgggcaccttctcagccacggtgggagccacggacacggtagcggaggacacgatgggcagcagcaggcagcaccacagcagagccacgggaccgggggagaaggagaaaccgcagtcgggacgacggcacatggtggctcgagatcccgggtgatcaagtcttcgtcgagtgattgtaaataaaatgtaatttacagtatagtattttaattaatatacaaatgatttgataataattcttatttaactataatatattgtgttgggttgaattaaaggtccgtatactagtatcgattcgcgacctactccggaatattaatagatcatggagataattaaaatgataaccatctcgcaaataaataagtattttactgttttcgtaacagttttgtaataaaaaaacctataaatattccggattattcataccgtcccaccatcgggcgcggatccgccaccatgtcccccaagaacctgacccccttcctgaccgctctgtggctgctgctgggccactcccgtgtgcctcgtgtgcgtgctgaggaatgctgcgagttcatcaacgtgaaccacccccccgagcgctgctacgacttcaagatgtgcaaccgtttcaccgtggctctgcgttgccccgacggcgaagtgtgctactcccccgaaaagaccgctgagatccgtggtatcgtgaccaccatgacccactccctgacccgtcaggtggtgcacaacaagctgacctcttgcaactacaaccccctgtacctcgaggctgacggtcgtatccgttgcggcaaggtcaacgacaaggctcagtacctgctgggtgctgctggttccgtgccctaccgttggatcaacctcgagtacgacaagatcacccgtatcgtgggcctggaccagtacctcgagtccgtgaagaagcacaagcgtctggacgtgtgccgtgctaagatgggttacatgctgcagtaaaagcttgtcgagaagtactagaggatcataatcagccataccacatttgtagaggttttacttgctttaaaaaacctcccacacctccccctgaacctgaaacataaaatgaatgcaattgttgttgttaacttgtttattgcagcttataatggttacaaataaagcaatagcatcacaaatttcacaaataaagcatttttttcactgcattctagttgtggtttgtccaaactcatcaatgtatcttatcatgtctggatctgatcactgcttgagcctagaagatccggctgctaacaaagcccgaaaggaagctgagttggctgctgtggctagctttgtttaactttaagaaggagatacatctagaccggaatattaatagatcatggagataattaaaatgataaccatctcgcaaataaataagtattttactgttttcgtaacagttttgtaataaaaaaacctataaatattccggattattcataccgtcccaccatcgggcgcggatccgccaccatgctgcgtctgctgctgcgtcaccacttccactgcctgctgctgtgcgctgtgtgggctaccccctgcctggcttccccttggtccaccctgaccgctaaccagaacccctccccaccctggtccaagctgacctactccaagccccacgacgctgctaccttctactgccccttcctgtacccatccccccctcgttccccactgcagttctccggtttccagcgtgtgctgaccggtcccgagtgccgtaacgagactctgtacctgctgtacaaccgcgagggccagaccctggtcgagaggtcctccacctgggtcaagaaggtcatctggtacttgtccggtcgtaaccagaccatcctgcagcgtatgccccgtaccgcttccaagccctccgacggcaacgtgcagatctccgtcgaggacgctaagatcttcggtgctcacatggtgcccaagcagaccaagctgctgcgtttcgtggtcaacgacggcacccgttaccagatgtgcgtgatgaagctcgagtcctgggctcacgtgttccgtgactactccgtgtccttccaagtgcgcctgaccttcaccgaggctaacaaccagacctacaccttctgcacccaccccaacctgatcgtgtaaaagcttgtcgagaagtactagaggatcataatcagccataccacatttgtagaggttttacttgctttaaaaaacctcccacacctccccctgaacctgaaacataaaatgaatgcaattgttgttgttaacttgtttattgcagcttataatggttacaaataaagcaatagcatcacaaatttcacaaataaagcatttttttcactgcattctagttgtggtttgtccaaactcatcaatgtatcttatcatgtctggatctgatcactgcttgagcctagaagatccggctgctaacaaagcccgaaaggaagctgagttggctgctgggtgcctaatgagtgagctaactcacattaattgcccggaatattaatagatcatggagataattaaaatgataaccatctcgcaaataaataagtattttactgttttcgtaacagttttgtaataaaaaaacctataaatattccggattattcataccgtcccaccatcgggcgcggatccgccaccatgcgtctgtgccgtgtgtggctgtccgtgtgcctgtgcgctgtggtgctgggccagtgccagcgtgaaaccgctgagaagaacgactactaccgtgtgccccactactgggacgcttgctcccgtgctctgcccgaccagacccgttacaagtacgtcgagcagctggtggacctgaccctgaactaccactacgacgcttcccacggcctggacaacttcgacgtgctgaagcgtatcaacgtgaccgaggtgtccctgctgatctccgacttccgtcgtcagaaccgtcgtggtggcaccaacaagcgtaccaccttcaacgctgctggttccctggctccccacgctcgttccctcgagttctccgtgcgtctgttcgctaactaaaagcttgtcgagaagtactagaggatcataatcagccataccacatttgtagaggttttacttgctttaaaaaacctcccacacctccccctgaacctgaaacataaaatgaatgcaattgttgttgttaacttgtttattgcagcttataatggttacaaataaagcaatagcatcacaaatttcacaaataaagcatttttttcactgcattctagttgtggtttgtccaaactcatcaatgtatcttatcatgtctggatctgatcactgcttgagcctagaagatccggctgctaacaaagcccgaaaggaagctgagttggctgctgccaccgctgagcaataactatcataacccctaggagatccgaaccagataagtgaaatctagttccaaactattttgtcatttttaattttcgtattagcttacgacgctacacccagttcccatctattttgtcactcttccctaaataatccttaaaaactccatttccacccctcccagttcccaactattttgtccgcccaca

SEQ ID NO: 12 - DNA, 11363 bp, Artificial Sequence
  Synthetic construct
ttgttccagtttggaacaagagtccactattaaagaacgtggactccaacgtcaaagggcgaaaaaccgtctatcagggcgatggcccactacgtgaaccatcaccctaatcaagttttttggggtcgaggtgccgtaaagcactaaatcggaaccctaaagggagcccccgatttagagcttgacggggaaagccggcgaacgtggcgagaaaggaagggaagaaagcgaaaggagcgggcgctagggcgctggcaagtgtagcggtcacgctgcgcgtaaccaccacacccgccgcgcttaatgcgccgctacagggcgcgtccattcgccattcaggctgcgcaactgttgggaagggcgatcggtgcgggcctcttcgctattacgccagctggcgaaagggggatgtgctgcaaggcgattaagttgggtaacgccagggttttcccagtcacgacgttgtaaaacgacggccagtgcatagaccagccgcgtaacctggcaaaatcggttacggttgagtaataaatggatgccctgcgtaagcgggtgtgggcggacaataaagtcttaaactgaacaaaatagatctaaactatgacaataaagtcttaaactagacagaatagttgtaaactgaaatcagtccagttatgctgtgaaaaagcatactggacttttgttatggctaaagcaaactcttcattttctgaagtgcaaattgcccgtcgtattaaagaggggcgtggccaagggcatggtaaagactatattcgcggcgttgtgacaatttaccgaacaactccgcggccgggaagccgatctcggcttgaacgaattgttaggtggcggtacttgggtcgatatcaaagtgcatcacttcttcccgtatgcccaactttgtatagagagccactgcgggatcgtcaccgtaatctgcttgcacgtagatcacataagcaccaagcgcgttggcctcatgcttgaggagattgatgagcgcggtggcaatgccctgcctccggtgctcgccggagactgcgagatcatagatatagatctcactacgcggctgctcaaacttgggcagaacgtaagccgcgagagcgccaacaaccgcttcttggtcgaaggcagcaagcgcgatgaatgtcttactacggagcaagttcccgaggtaatcggagtccggctgatgttgggagtaggtggctacgtctccgaactcacgaccgaaaagatcaagagcagcccgcatggatttgacttggtcagggccgagcctacatgtgcgaatgatgcccatacttgagccacctaactttgttttagggcgactgccctgctgcgtaacatcgttgctgctgcgtaacatcgttgctgctccataacatcaaacatcgacccacggcgtaacgcgcttgctgcttggatgcccgaggcatagactgtacaaaaaaacagtcataacaagccatgaaaaccgccactgcgccgttaccaccgctgcgttcggtcaaggttctggaccagttgcgtgagcgcatacgctacttgcattacagtttacgaaccgaacaggcttatgtcaactgggtttgtgccttcatccgtttccacggtgtgcgtcacccggcaaccttgggcagcagcgaagtcgaggcatttctgtcctggctggcgaacgagcgcaaggtttcggtctccacgcatcgtcaggcattggcggccttgctgttcttctacggcaaggtgctgtgcacggatctgcccttgcttcaggagatcggtagacctcggccgtcgcggcgcttgccggtggtgctgaccccggatgaagtggttcgcatcctcggttttctggaaggcgagcatcgtttgttcgcccaggactctagctatagttctagtggttggctacagctttgtttgtactatcaacaggttgaactgctgatcaacagatcctctacgcggccgcggtaccataacttcgtatagcatacattatacgaagttatctggttttactagtatcgattcgcgacctactccggaatattaatagatcatggagataattaaaatgataaccatctcgcaaataaataagtattttactgttttcgtaacagttttgtaataaaaaaacctataaatattccggattattcataccgtcccaccatcgggcgcggatccgccaccatgcgtcccggcctgccctcctacctgatcgtgctggctgtgtgcctgctgtcccacctcctgtcctcccgttacggtgctgaggctatctccgagcccctggacaaggctttccacctcctgctgaacacctacggtcgtcctatccgtttcctgcgcgagaacaccacccagtgcacctacaactcctccctgcgcaactccaccgtcgtccgcgagaacgctatctccttcaacttcttccagtcctacaaccagtactacgtgttccacatgccccgttgcctgttcgctggtcccctggctgagcagttcctgaaccaggtggacctgaccgagactctcgagcgttaccagcagcgtctgaacacttacgctctggtgtccaaggacctggcttcctaccgttccttcagccagcagctgaaggctcaggactccctgggcgagcagcccaccactgtgcctccccctatcgacctgtccatcccccacgtgtggatgcccccccagaccactcctcacggctggaccgagtcccacaccacctccggactgcaccgtccccacttcaaccagacctgcatcctgttcgacggtcacgacctgctgttctccaccgtgaccccctgcctgcaccagggcttctacctcatcgacgagctgcgttacgtgaagatcaccctgaccgaggatttcttcgtggtcaccgtgtccatcgacgacgacacccccatgctgctgatcttcggtcacctcccccgtgtgctgttcaaggctccctaccagcgtgacaacttcatcctgcgtcagaccgagaagcacgagctgctggtgctggtcaagaaggaccagctgaaccgtcactcttacctgaaggaccccgacttcctggacgctgctctggacttcaactacctggacctgtccgctctgctgaggaactccttccaccgttacgctgtggacgtgctgaagtccggtcgttgccagatgctggaccgtcgtaccgtcgagatggctttcgcttacgccctggctctgttcgctgctgctcgtcaagaagaggctggcgctcaggtgtccgtgccccgtgctctggaccgtcaggctgctctgctgcagatccaagagttcatgatcacttgcctgtcccagaccccccctcgtaccaccctgctgctgtaccccaccgctgtggacctggctaagcgtgctctgtggacccccaaccagatcaccgacatcacctccctcgtgcgtctggtgtacatcctgtccaagcagaaccagcagcacctgatcccccagtgggctctgcgtcagatcgctgacttcgctctgaagctgcacaagacccacctggcttcattcctcagcgctttcgctcgccaagagctgtacctgatgggttccctggtgcactccatgctggtgcacaccaccgagcgtcgcgagatcttcatcgtggaaaccggcctgtgctccctggccgagctgtcccacttcacccagctgctggctcacccccaccacgagtacctgtccgacctgtacaccccctgctcctcttccggtcgtcgtgaccactccctggaacgtctgacccgtctgttccccgacgctaccgtgcctaccaccgtgcctgctgctctgtccatcctgtctaccatgcagccctccaccctggaaaccttccccgacctgttctgcctgcctctgggcgagtccttctccgctctgaccgtgtccgagcacgtgtcctacgtggtcaccaaccagtacctgatcaagggcatctcctaccccgtgtccaccaccgtcgtgggccagtccctgatcatcacccagaccgactcccagaccaagtgcgagctgacccgtaacatgcacaccactcactccatcaccgctgctctgaacatctccctcgagaactgcgctttctgccagtccgctctgttggagtacgacgacactcagggtgtcatcaacatcatgtacatgcacgactccgacgacgtgctgttcgctctggacccctacaacgaggtggtggtgtcctccccccgtacccactacctgatgctgctgaagaacggcaccgtgctggaagtgaccgacgtggtggtggacgctaccgaccgtctgctgatgatgtccgtgtacgctctgtccgctatcatcggcatctacctgctgtaccgtatgctgaagacctgctaaggcgccaagctttgtcgagaagtactagaggatcataatcagccataccacatttgtagaggttttacttgctttaaaaaacctcccacacctccccctgaacctgaaacataaaatgaatgcaattgttgttgttaacttgtttattgcagcttataatggttacaaataaagcaatagcatcacaaatttcacaaataaagcatttttttcactgcattctagttgtggtttgtccaaactcatcaatgtatcttatcatgtctggatctgatcactgcttgagcctagaagatccggctgctaacaaagcccgaaaggaagctgagttggctgctgccaccgctgagcaataactatcataacccctaggggcctctaaacgggtcttgaggggttttttgctgaaaggaggaactatatccggatctgaacaggagggacagctgatagaaacagaagccactggagcacctcaaaaacaccatcatacactaaatcagtaagttggcagcatcacccgacgcactttgcgccgaataaatacctgtgacggaagatcacttcgcagaataaataaatcctggtgtccctgttgataccgggaagccctgggccaacttttggcgaaaatgagacgttgatcggcacgtaagaggttccaactttcaccataatgaaataagatcactaccgggcgtattttttgagttatcgagattttcaggagctaaggaagctaaaatggagaaaaaaatcactggatataccaccgttgatatatcccaatggcatcgtaaagaacattttgaggcatttcagtcagttgctcaatgtacctataaccagaccgttcagctggatattacggcctttttaaagaccgtaaagaaaaataagcacaagttttatccggcctttattcacattcttgcccgcctgatgaatgctcatccggaattccgtatggcaatgaaagacggtgagctggtgatatgggatagtgttcacccttgttacaccgttttccatgagcaaactgaaacgttttcatcgctctggagtgaataccacgacgatttccggcagtttctacacatatattcgcaagatgtggcgtgttacggtgaaaacctggcctatttccctaaagggtttattgagaatatgtttttcgtctcagccaatccctgggtgagtttcaccagttttgatttaaacgtggccaatatggacaacttcttcgcccccgttttcaccatgggcaaatattatacgcaaggcgacaaggtgctgatgccgctggcgattcaggttcatcatgccgtttgtgatggcttccatgtcggcagaatgcttaatgaattacaacagtactgcgatgagtggcagggcggggcgtaatttttttaaggcagttattggtgcccttaaacgcctggttgctacgcctgaataagtgataataagcggatgaatggcagaaattcgaaagcaaattcgacccggtcgtcggttcagggcagggtcgttaaatagccgcttatgtctattgctggtttaccggtttattgactaccggaagcagtgtgaccgtgtgcttctcaaatgcctgaggccagtttgctcaggctctccccgtggaggtaataattgacgatatgatcatttattctgcctcccagctgacattcatccggggtcagcaccgtttctgcggactggctttctacgtgttccgcttcctttagcagcccttgcgccctgagtgcttgcggcagcgtgaagctaattctgtcagccgttaagtgttcctgtgtcactcaaaattgctttgagaggctctaagggcttctcagtgcgttacatccctggcttgttgtccacaaccgttaaaccttaaaagctttaaaagccttatatattcttttttttcttataaaacttaaaaccttagaggctatttaagttgctgatttatattaattttattgttcaaacatgagagcttagtacgtgaaacatgagagcttagtacgttagccatgagagcttagtacgttagccatgagggtttagttcgttaaacatgagagcttagtacgttaaacatgagagcttagtacgtgaaacatgagagcttagtacgtactatcaacaggttgaactgctgatcaacagatcctctacgcggccgcggtaccataacttcgtatagcatacattatacgaagttatctggtttaaacgtacccgtagtggctatggcagggcttgccgccccgacgttggctgcgagccctgggccttcacccgaacttgggggttggggtggggaaaaggaagaaacgcgggcgtattggtcccaatggggtctcggtggggtatcgacagagtgccagccctgggaccgaaccccgcgtttatgaacaaacgacccaacacccgtgcgttttattctgtctttttattgccgtcatagcgcgggttccttccggtattgtctccttccgtgtttcagttagcctcccccatctccggtaccgcatgctatgcttagtgatggtggtggtgatggtggtggctgcctccccccccagacccccctccgccgcttccgcgagcgtccacagcctggggaccgtaacgggagtgagcgggcaggttcacacgggtctgcttcagctcagggggcaggccagcgtagtacttgtccaggtgacgcagcaggggggggtccagctggtgacgcaggcagaattccttcacagcgttgtacaggccgtagaacagggtgataccctcgggagcagcagcggtggacacgggcagacgcacagcacggttggtacgggtagcctcgttacggatagccaccaccacgttgaacagggaggggggcaccagctcgaaacccagcacgtgttcggtgaagatggaacgaccgtaggacagacgagtcaggtcgtaaccacggcacaggtcgtccacgcaagtgtacacagcgggggaaccgtcgccgcactcggagtaaccgcgcatcacggtcatccaacggggagcggtgtcggaggacagcagggtcagcagagcacgcagctggtcggggttgttgtacagcagggccagggtgtccaggaaagcgtcgtccagcagcacggagttagcagcctcgggggtcacgggacggtaacggatcagctgggacaggggaccgtccctacgggtcacgttgaccaggggacgcagccaggactcgtacttgtcgccctggaacacctctcccagcaggcaacgacgggtcagctcggggcactcagcgggcaccttctcagccacggtgggagccacggacacggtagcggaggacacgatgggcagcagcaggcagcaccacagcagagccacgggaccgggggagaaggagaaaccgcagtcgggacgacggcacatggtggctcgagatcccgggtgatcaagtcttcgtcgagtgattgtaaataaaatgtaatttacagtatagtattttaattaatatacaaatgatttgataataattcttatttaactataatatattgtgttgggttgaattaaaggtccgtatactagtatcgattcgcgacctactccggaatattaatagatcatggagataattaaaatgataaccatctcgcaaataaataagtattttactgttttcgtaacagttttgtaataaaaaaacctataaatattccggattattcataccgtcccaccatcgggcgcggatccgccaccatgaactccaaggacctgacccccttcctgaccaccctgtggctgctgctggaccactcccgtgtgcctcgtgtgcgtgctgaggaatgctgcgaagtgatcaacgtgaaccacccccccgagcgctgctacgacttcaagatgtgcaacctgttcaccgtggctctgcgttgccccgacggcgaagtgtgctactcccccgaaaagaccgctgagatccgtggtatcgtgaccaccatgacccactccctgacccgtcaagtgatccacaacaagctgaccagctgcaactacaaccccctgtacctcgaggctgacggtcgtatccgttgcggcaaggtgtccgacaaggctcagtacctgctgggtgctgctggttccgtgccctaccgttggatcaacctcgagtacgacaagatcacccgtatcgtgggcctggaccagtacctcgagtccgtgaagaagcacaagcgtctggacgtgtgccgtgctaagatgggttacatgctgcagtaaaagcttgtcgagaagtactagaggatcataatcagccataccacatttgtagaggttttacttgctttaaaaaacctcccacacctccccctgaacctgaaacataaaatgaatgcaattgttgttgttaacttgtttattgcagcttataatggttacaaataaagcaatagcatcacaaatttcacaaataaagcatttttttcactgcattctagttgtggtttgtccaaactcatcaatgtatcttatcatgtctggatctgatcactgcttgagcctagaagatccggctgctaacaaagcccgaaaggaagctgagttggctgctgtggctagctttgtttaactttaagaaggagatacatctagaccggaatattaatagatcatggagataattaaaatgataaccatctcgcaaataaataagtattttactgttttcgtaacagttttgtaataaaaaaacctataaatattccggattattcataccgtcccaccatcgggcgcggatccgccaccatgctgcgtctgctgctgcgtcaccacttccactgcctgctgctgtgcgctgtgtgggctaccccctgcctggcttccccttggtccaccctgaccgctaaccagaacccctccccaccctggtccaagctgacctactccaagccccacgacgctgctaccttctactgccccttcctgtacccatccccccctcgttccccactgcagttctccggtttccagcgtgtgctgaccggtcccgagtgccgtaacgagactctgtacctgctgtacaaccgcgagggccagaccctggtcgagaggtcctccacctgggtcaagaaggtcatctggtacttgtccggtcgtaaccagaccatcctgcagcgtatgccccgtaccgcttccaagccctccgacggcaacgtgcagatctccgtcgaggacgctaagatcttcggtgctcacatggtgcccaagcagaccaagctgctgcgtttcgtggtcaacgacggcacccgttaccagatgtgcgtgatgaagctcgagtcctgggctcacgtgttccgtgactactccgtgtccttccaagtgcgcctgaccttcaccgaggctaacaaccagacctacaccttctgcacccaccccaacctgatcgtgtaaaagcttgtcgagaagtactagaggatcataatcagccataccacatttgtagaggttttacttgctttaaaaaacctcccacacctccccctgaacctgaaacataaaatgaatgcaattgttgttgttaacttgtttattgcagcttataatggttacaaataaagcaatagcatcacaaatttcacaaataaagcatttttttcactgcattctagttgtggtttgtccaaactcatcaatgtatcttatcatgtctggatctgatcactgcttgagcctagaagatccggctgctaacaaagcccgaaaggaagctgagttggctgctgggtgcctaatgagtgagctaactcacattaattgcccggaatattaatagatcatggagataattaaaatgataaccatctcgcaaataaataagtattttactgttttcgtaacagttttgtaataaaaaaacctataaatattccggattattcataccgtcccaccatcgggcgcggatccgccaccatgcgtctgtgccgtgtgtggctgtccgtgtgcctgtgcgctgtggtgctgggccagtgccagcgtgaaaccgctgagaagaacgactactaccgtgtgccccactactgggacgcttgctcccgtgctctgcccgaccagacccgttacaagtacgtcgagcagctggtggacctgaccctgaactaccactacgacgcttcccacggcctggacaacttcgacgtgctgaagcgtatcaacgtgaccgaggtgtccctgctgatctccgacttccgtcgtcagaaccgtcgtggtggcaccaacaagcgtaccaccttcaacgctgctggttccctggctccccacgctcgttccctcgagttctccgtgcgtctgttcgctaactaaaagcttgtcgagaagtactagaggatcataatcagccataccacatttgtagaggttttacttgctttaaaaaacctcccacacctccccctgaacctgaaacataaaatgaatgcaattgttgttgttaacttgtttattgcagcttataatggttacaaataaagcaatagcatcacaaatttcacaaataaagcatttttttcactgcattctagttgtggtttgtccaaactcatcaatgtatcttatcatgtctggatctgatcactgcttgagcctagaagatccggctgctaacaaagcccgaaaggaagctgagttggctgctgccaccgctgagcaataactatcataacccctaggagatccgaaccagataagtgaaatctagttccaaactattttgtcatttttaattttcgtattagcttacgacgctacacccagttcccatctattttgtcactcttccctaaataatccttaaaaactccatttccacccctcccagttcccaactattttgtccgcccaca

SEQ ID NO: 13 - DNA, 11432 bp, Artificial Sequence
  Synthetic construct
ttgttccagtttggaacaagagtccactattaaagaacgtggactccaacgtcaaagggcgaaaaaccgtctatcagggcgatggcccactacgtgaaccatcaccctaatcaagttttttggggtcgaggtgccgtaaagcactaaatcggaaccctaaagggagcccccgatttagagcttgacggggaaagccggcgaacgtggcgagaaaggaagggaagaaagcgaaaggagcgggcgctagggcgctggcaagtgtagcggtcacgctgcgcgtaaccaccacacccgccgcgcttaatgcgccgctacagggcgcgtccattcgccattcaggctgcgcaactgttgggaagggcgatcggtgcgggcctcttcgctattacgccagctggcgaaagggggatgtgctgcaaggcgattaagttgggtaacgccagggttttcccagtcacgacgttgtaaaacgacggccagtgcatagaccagccgcgtaacctggcaaaatcggttacggttgagtaataaatggatgccctgcgtaagcgggtgtgggcggacaataaagtcttaaactgaacaaaatagatctaaactatgacaataaagtcttaaactagacagaatagttgtaaactgaaatcagtccagttatgctgtgaaaaagcatactggacttttgttatggctaaagcaaactcttcattttctgaagtgcaaattgcccgtcgtattaaagaggggcgtggccaagggcatggtaaagactatattcgcggcgttgtgacaatttaccgaacaactccgcggccgggaagccgatctcggcttgaacgaattgttaggtggcggtacttgggtcgatatcaaagtgcatcacttcttcccgtatgcccaactttgtatagagagccactgcgggatcgtcaccgtaatctgcttgcacgtagatcacataagcaccaagcgcgttggcctcatgcttgaggagattgatgagcgcggtggcaatgccctgcctccggtgctcgccggagactgcgagatcatagatatagatctcactacgcggctgctcaaacttgggcagaacgtaagccgcgagagcgccaacaaccgcttcttggtcgaaggcagcaagcgcgatgaatgtcttactacggagcaagttcccgaggtaatcggagtccggctgatgttgggagtaggtggctacgtctccgaactcacgaccgaaaagatcaagagcagcccgcatggatttgacttggtcagggccgagcctacatgtgcgaatgatgcccatacttgagccacctaactttgttttagggcgactgccctgctgcgtaacatcgttgctgctgcgtaacatcgttgctgctccataacatcaaacatcgacccacggcgtaacgcgcttgctgcttggatgcccgaggcatagactgtacaaaaaaacagtcataacaagccatgaaaaccgccactgcgccgttaccaccgctgcgttcggtcaaggttctggaccagttgcgtgagcgcatacgctacttgcattacagtttacgaaccgaacaggcttatgtcaactgggtttgtgccttcatccgtttccacggtgtgcgtcacccggcaaccttgggcagcagcgaagtcgaggcatttctgtcctggctggcgaacgagcgcaaggtttcggtctccacgcatcgtcaggcattggcggccttgctgttcttctacggcaaggtgctgtgcacggatctgcccttgcttcaggagatcggtagacctcggccgtcgcggcgcttgccggtggtgctgaccccggatgaagtggttcgcatcctcggttttctggaaggcgagcatcgtttgttcgcccaggactctagctatagttctagtggttggctacagctttgtttgtactatcaacaggttgaactgctgatcaacagatcctctacgcggccgcggtaccataacttcgtatagcatacattatacgaagttatctggttttactagtatcgattcgcgacctactccggaatattaatagatcatggagataattaaaatgataaccatctcgcaaataaataagtattttactgttttcgtaacagttttgtaataaaaaaacctataaatattccggattattcataccgtcccaccatcgggcgcggatccgccaccatgcgtcccggcctgccctcctacctgatcgtgctggctgtgtgcctgctgtcccacctcctgtcctcccgttacggtgctgaggctatctccgagcccctggacaaggctttccacctcctgctgaacacctacggtcgtcctatccgtttcctgcgcgagaacaccacccagtgcacctacaactcctccctgcgcaactccaccgtcgtccgcgagaacgctatctccttcaacttcttccagtcctacaaccagtactacgtgttccacatgccccgttgcctgttcgctggtcccctggctgagcagttcctgaaccaggtggacctgaccgagactctcgagcgttaccagcagcgtctgaacacttacgctctggtgtccaaggacctggcttcctaccgttccttcagccagcagctgaaggctcaggactccctgggcgagcagcccaccactgtgcctccccctatcgacctgtccatcccccacgtgtggatgcccccccagaccactcctcacggctggaccgagtcccacaccacctccggactgcaccgtccccacttcaaccagacctgcatcctgttcgacggtcacgacctgctgttctccaccgtgaccccctgcctgcaccagggcttctacctcatcgacgagctgcgttacgtgaagatcaccctgaccgaggatttcttcgtggtcaccgtgtccatcgacgacgacacccccatgctgctgatcttcggtcacctcccccgtgtgctgttcaaggctccctaccagcgtgacaacttcatcctgcgtcagaccgagaagcacgagctgctggtgctggtcaagaaggaccagctgaaccgtcactcttacctgaaggaccccgacttcctggacgctgctctggacttcaactacctggacctgtccgctctgctgaggaactccttccaccgttacgctgtggacgtgctgaagtccggtcgttgccagatgctggaccgtcgtaccgtcgagatggctttcgcttacgccctggctctgttcgctgctgctcgtcaagaagaggctggcgctcaggtgtccgtgccccgtgctctggaccgtcaggctgctctgctgcagatccaagagttcatgatcacttgcctgtcccagaccccccctcgtaccaccctgctgctgtaccccaccgctgtggacctggctaagcgtgctctgtggacccccaaccagatcaccgacatcacctccctcgtgcgtctggtgtacatcctgtccaagcagaaccagcagcacctgatcccccagtgggctctgcgtcagatcgctgacttcgctctgaagctgcacaagacccacctggcttcattcctcagcgctttcgctcgccaagagctgtacctgatgggttccctggtgcactccatgctggtgcacaccaccgagcgtcgcgagatcttcatcgtggaaaccggcctgtgctccctggccgagctgtcccacttcacccagctgctggctcacccccaccacgagtacctgtccgacctgtacaccccctgctcctcttccggtcgtcgtgaccactccctggaacgtctgacccgtctgttccccgacgctaccgtgcctaccaccgtgcctgctgctctgtccatcctgtctaccatgcagccctccaccctggaaaccttccccgacctgttctgcctgcctctgggcgagtccttctccgctctgaccgtgtccgagcacgtgtcctacgtggtcaccaaccagtacctgatcaagggcatctcctaccccgtgtccaccaccgtcgtgggccagtccctgatcatcacccagaccgactcccagaccaagtgcgagctgacccgtaacatgcacaccactcactccatcaccgctgctctgaacatctccctcgagaactgcgctttctgccagtccgctctgttggagtacgacgacactcagggtgtcatcaacatcatgtacatgcacgactccgacgacgtgctgttcgctctggacccctacaacgaggtggtggtgtcctccccccgtacccactacctgatgctgctgaagaacggcaccgtgctggaagtgaccgacgtggtggtggacgctaccgaccgtctgctgatgatgtccgtgtacgctctgtccgctatcatcggcatctacctgctgtaccgtatgctgaagacctgctaaggcgccaagctttgtcgagaagtactagagatcataatcagccataccacatttgtagaggttttacttgctttaaaaaacctcccacacctccccctgaacctgaaacataaaatgaatgcaattgttgttgttaacttgtttattgcagcttataatggttacaaataaagcaatagcatcacaaatttcacaaataaagcatttttttcactgcattctagttgtggtttgtccaaactcatcaatgtatcttatcatgtctggatctgatcactgcttgagcctagaagatccggctgctaacaaagcccgaaaggaagctgagttggctgctgccaccgctgagcaataactatcataacccctaggggcctctaaacgggtcttgaggggttttttgctgaaaggaggaactatatccggatctgaacaggagggacagctgatagaaacagaagccactggagcacctcaaaaacaccatcatacactaaatcagtaagttggcagcatcacccgacgcactttgcgccgaataaatacctgtgacggaagatcacttcgcagaataaataaatcctggtgtccctgttgataccgggaagccctgggccaacttttggcgaaaatgagacgttgatcggcacgtaagaggttccaactttcaccataatgaaataagatcactaccgggcgtattttttgagttatcgagattttcaggagctaaggaagctaaaatggagaaaaaaatcactggatataccaccgttgatatatcccaatggcatcgtaaagaacattttgaggcatttcagtcagttgctcaatgtacctataaccagaccgttcagctggatattacggcctttttaaagaccgtaaagaaaaataagcacaagttttatccggcctttattcacattcttgcccgcctgatgaatgctcatccggaattccgtatggcaatgaaagacggtgagctggtgatatgggatagtgttcacccttgttacaccgttttccatgagcaaactgaaacgttttcatcgctctggagtgaataccacgacgatttccggcagtttctacacatatattcgcaagatgtggcgtgttacggtgaaaacctggcctatttccctaaagggtttattgagaatatgtttttcgtctcagccaatccctgggtgagtttcaccagttttgatttaaacgtggccaatatggacaacttcttcgcccccgttttcaccatgggcaaatattatacgcaaggcgacaaggtgctgatgccgctggcgattcaggttcatcatgccgtttgtgatggcttccatgtcggcagaatgcttaatgaattacaacagtactgcgatgagtggcagggcggggcgtaatttttttaaggcagttattggtgcccttaaacgcctggttgctacgcctgaataagtgataataagcggatgaatggcagaaattcgaaagcaaattcgacccggtcgtcggttcagggcagggtcgttaaatagccgcttatgtctattgctggtttaccggtttattgactaccggaagcagtgtgaccgtgtgcttctcaaatgcctgaggccagtttgctcaggctctccccgtggaggtaataattgacgatatgatcatttattctgcctcccagctgacattcatccggggtcagcaccgtttctgcggactggctttctacgtgttccgcttcctttagcagcccttgcgccctgagtgcttgcggcagcgtgaagctaattctgtcagccgttaagtgttcctgtgtcactcaaaattgctttgagaggctctaagggcttctcagtgcgttacatccctggcttgttgtccacaaccgttaaaccttaaaagctttaaaagccttatatattcttttttttcttataaaacttaaaaccttagaggctatttaagttgctgatttatattaattttattgttcaaacatgagagcttagtacgtgaaacatgagagcttagtacgttagccatgagagcttagtacgttagccatgagggtttagttcgttaaacatgagagcttagtacgttaaacatgagagcttagtacgtgaaacatgagagcttagtacgtactatcaacaggttgaactgctgatcaacagatcctctacgcggccgcggtaccataacttcgtatagcatacattatacgaagttatctggtttaaacgtacccgtagtggctatggcagggcttgccgccccgacgttggctgcgagccctgggccttcacccgaacttgggggttggggtggggaaaaggaagaaacgcgggcgtattggtcccaatggggtctcggtggggtatcgacagagtgccagccctgggaccgaaccccgcgtttatgaacaaacgacccaacacccgtgcgttttattctgtctttttattgccgtcatagcgcgggttccttccggtattgtctccttccgtgtttcagttagcctcccccatctcccggtaccgcatgctatgcttagtgatggtggtggtgatggtggtggctgcctccccccccagacccccctccgccgcttcctttttcgaactgcgggtggctccagctacctccgccgggcccctggaacagaacttccagggcgccttagcgagcgtccacagcctggggaccgtaacgggagtgagcgggcaggttcacacgggtctgcttcagctcagggggcaggccagcgtagtacttgtccaggtgacgcagcaggggggggtccagctggtgacgcaggcagaattccttcacagcgttgtacaggccgtagaacagggtgataccctcgggagcagcagcggtggacacgggcagacgcacagcacggttggtacgggtagcctcgttacggatagccaccaccacgttgaacagggaggggggcaccagctcgaaacccagcacgtgttcggtgaagatggaacgaccgtaggacagacgagtcaggtcgtaaccacggcacaggtcgtccacgcaagtgtacacagcgggggaaccgtcgccgcactcggagtaaccgcgcatcacggtcatccaacggggagcggtgtcggaggacagcagggtcagcagagcacgcagctggtcggggttgttgtacagcagggccagggtgtccaggaaagcgtcgtccagcagcacggagttagcagcctcgggggtcacgggacggtaacggatcagctgggacaggggaccgtccctacgggtcacgttgaccaggggacgcagccaggactcgtacttgtcgccctggaacacctctcccagcaggcaacgacgggtcagctcggggcactcagcgggcaccttctcagccacggtgggagccacggacacggtagcggaggacacgatgggcagcagcaggcagcaccacagcagagccacgggaccgggggagaaggagaaaccgcagtcgggacgacggcacatggtggctcgagatcccgggtgatcaagtcttcgtcgagtgattgtaaataaaatgtaatttacagtatagtattttaattaatatacaaatgatttgataataattcttatttaactataatatattgtgttgggttgaattaaaggtccgtatactagtatcgattcgcgacctactccggaatattaatagatcatggagataattaaaatgataaccatctcgcaaataaataagtattttactgttttcgtaacagttttgtaataaaaaaacctataaatattccggattattcataccgtcccaccatcgggcgcggatccgccaccatgtcccccaagaacctgacccccttcctgaccgctctgtggctgctgctgggccactcccgtgtgcctcgtgtgcgtgctgaggaatgctgcgagttcatcaacgtgaaccacccccccgagcgctgctacgacttcaagatgtgcaaccgtttcaccgtggctctgcgttgccccgacggcgaagtgtgctactcccccgaaaagaccgctgagatccgtggtatcgtgaccaccatgacccactccctgacccgtcaggtggtgcacaacaagctgacctcttgcaactacaaccccctgtacctcgaggctgacggtcgtatccgttgcggcaaggtcaacgacaaggctcagtacctgctgggtgctgctggttccgtgccctaccgttggatcaacctcgagtacgacaagatcacccgtatcgtgggcctggaccagtacctcgagtccgtgaagaagcacaagcgtctggacgtgtgccgtgctaagatgggttacatgctgcagtaaaagcttgtcgagaagtactagaggatcataatcagccataccacatttgtagaggttttacttgctttaaaaaacctcccacacctccccctgaacctgaaacataaaatgaatgcaattgttgttgttaacttgtttattgcagcttataatggttacaaataaagcaatagcatcacaaatttcacaaataaagcatttttttcactgcattctagttgtggtttgtccaaactcatcaatgtatcttatcatgtctggatctgatcactgcttgagcctagaagatccggctgctaacaaagcccgaaaggaagctgagttggctgctgtggctagctttgtttaactttaagaaggagatacatctagaccggaatattaatagatcatggagataattaaaatgataaccatctcgcaaataaataagtattttactgttttcgtaacagttttgtaataaaaaaacctataaatattccggattattcataccgtcccaccatcgggcgcggatccgccaccatgctgcgtctgctgctgcgtcaccacttccactgcctgctgctgtgcgctgtgtgggctaccccctgcctggcttccccttggtccaccctgaccgctaaccagaacccctccccaccctggtccaagctgacctactccaagccccacgacgctgctaccttctactgccccttcctgtacccatccccccctcgttccccactgcagttctccggtttccagcgtgtgctgaccggtcccgagtgccgtaacgagactctgtacctgctgtacaaccgcgagggccagaccctggtcgagaggtcctccacctgggtcaagaaggtcatctggtacttgtccggtcgtaaccagaccatcctgcagcgtatgccccgtaccgcttccaagccctccgacggcaacgtgcagatctccgtcgaggacgctaagatcttcggtgctcacatggtgcccaagcagaccaagctgctgcgtttcgtggtcaacgacggcacccgttaccagatgtgcgtgatgaagctcgagtcctgggctcacgtgttccgtgactactccgtgtccttccaagtgcgcctgaccttcaccgaggctaacaaccagacctacaccttctgcacccaccccaacctgatcgtgtaaaagcttgtcgagaagtactagaggatcataatcagccataccacatttgtagaggttttacttgctttaaaaaacctcccacacctccccctgaacctgaaacataaaatgaatgcaattgttgttgttaacttgtttattgcagcttataatggttacaaataaagcaatagcatcacaaatttcacaaataaagcatttttttcactgcattctagttgtggtttgtccaaactcatcaatgtatcttatcatgtctggatctgatcactgcttgagcctagaagatccggctgctaacaaagcccgaaaggaagctgagttggctgctgggtgcctaatgagtgagctaactcacattaattgcccggaatattaatagatcatggagataattaaaatgataaccatctcgcaaataaataagtattttactgttttcgtaacagttttgtaataaaaaaacctataaatattccggattattcataccgtcccaccatcgggcgcggatccgccaccatgcgtctgtgccgtgtgtggctgtccgtgtgcctgtgcgctgtggtgctgggccagtgccagcgtgaaaccgctgagaagaacgactactaccgtgtgccccactactgggacgcttgctcccgtgctctgcccgaccagacccgttacaagtacgtcgagcagctggtggacctgaccctgaactaccactacgacgcttcccacggcctggacaacttcgacgtgctgaagcgtatcaacgtgaccgaggtgtccctgctgatctccgacttccgtcgtcagaaccgtcgtggtggcaccaacaagcgtaccaccttcaacgctgctggttccctggctccccacgctcgttccctcgagttctccgtgcgtctgttcgctaactaaaagcttgtcgagaagtactagaggatcataatcagccataccacatttgtagaggttttacttgctttaaaaaacctcccacacctccccctgaacctgaaacataaaatgaatgcaattgttgttgttaacttgtttattgcagcttataatggttacaaataaagcaatagcatcacaaatttcacaaataaagcatttttttcactgcattctagttgtggtttgtccaaactcatcaatgtatcttatcatgtctggatctgatcactgcttgagcctagaagatccggctgctaacaaagcccgaaaggaagctgagttggctgctgccaccgctgagcaataactatcataacccctaggagatccgaaccagataagtgaaatctagttccaaactattttgtcatttttaattttcgtattagcttacgacgctacacccagttcccatctattttgtcactcttccctaaataatccttaaaaactccatttccacccctcccagttcccaactattttgtccgcccaca

SEQ ID NO: 14 - DNA, 11432 bp, Artificial Sequence
  Synthetic construct
ttgttccagtttggaacaagagtccactattaaagaacgtggactccaacgtcaaagggcgaaaaaccgtctatcagggcgatggcccactacgtgaaccatcaccctaatcaagttttttggggtcgaggtgccgtaaagcactaaatcggaaccctaaagggagcccccgatttagagcttgacggggaaagccggcgaacgtggcgagaaaggaagggaagaaagcgaaaggagcgggcgctagggcgctggcaagtgtagcggtcacgctgcgcgtaaccaccacacccgccgcgcttaatgcgccgctacagggcgcgtccattcgccattcaggctgcgcaactgttgggaagggcgatcggtgcgggcctcttcgctattacgccagctggcgaaagggggatgtgctgcaaggcgattaagttgggtaacgccagggttttcccagtcacgacgttgtaaaacgacggccagtgcatagaccagccgcgtaacctggcaaaatcggttacggttgagtaataaatggatgccctgcgtaagcgggtgtgggcggacaataaagtcttaaactgaacaaaatagatctaaactatgacaataaagtcttaaactagacagaatagttgtaaactgaaatcagtccagttatgctgtgaaaaagcatactggacttttgttatggctaaagcaaactcttcattttctgaagtgcaaattgcccgtcgtattaaagaggggcgtggccaagggcatggtaaagactatattcgcggcgttgtgacaatttaccgaacaactccgcggccgggaagccgatctcggcttgaacgaattgttaggtggcggtacttgggtcgatatcaaagtgcatcacttcttcccgtatgcccaactttgtatagagagccactgcgggatcgtcaccgtaatctgcttgcacgtagatcacataagcaccaagcgcgttggcctcatgcttgaggagattgatgagcgcggtggcaatgccctgcctccggtgctcgccggagactgcgagatcatagatatagatctcactacgcggctgctcaaacttgggcagaacgtaagccgcgagagcgccaacaaccgcttcttggtcgaaggcagcaagcgcgatgaatgtcttactacggagcaagttcccgaggtaatcggagtccggctgatgttgggagtaggtggctacgtctccgaactcacgaccgaaaagatcaagagcagcccgcatggatttgacttggtcagggccgagcctacatgtgcgaatgatgcccatacttgagccacctaactttgttttagggcgactgccctgctgcgtaacatcgttgctgctgcgtaacatcgttgctgctccataacatcaaacatcgacccacggcgtaacgcgcttgctgcttggatgcccgaggcatagactgtacaaaaaaacagtcataacaagccatgaaaaccgccactgcgccgttaccaccgctgcgttcggtcaaggttctggaccagttgcgtgagcgcatacgctacttgcattacagtttacgaaccgaacaggcttatgtcaactgggtttgtgccttcatccgtttccacggtgtgcgtcacccggcaaccttgggcagcagcgaagtcgaggcatttctgtcctggctggcgaacgagcgcaaggtttcggtctccacgcatcgtcaggcattggcggccttgctgttcttctacggcaaggtgctgtgcacggatctgcccttgcttcaggagatcggtagacctcggccgtcgcggcgcttgccggtggtgctgaccccggatgaagtggttcgcatcctcggttttctggaaggcgagcatcgtttgttcgcccaggactctagctatagttctagtggttggctacagctttgtttgtactatcaacaggttgaactgctgatcaacagatcctctacgcggccgcggtaccataacttcgtatagcatacattatacgaagttatctggttttactagtatcgattcgcgacctactccggaatattaatagatcatggagataattaaaatgataaccatctcgcaaataaataagtattttactgttttcgtaacagttttgtaataaaaaaacctataaatattccggattattcataccgtcccaccatcgggcgcggatccgccaccatgcgtcccggcctgccctcctacctgatcgtgctggctgtgtgcctgctgtcccacctcctgtcctcccgttacggtgctgaggctatctccgagcccctggacaaggctttccacctcctgctgaacacctacggtcgtcctatccgtttcctgcgcgagaacaccacccagtgcacctacaactcctccctgcgcaactccaccgtcgtccgcgagaacgctatctccttcaacttcttccagtcctacaaccagtactacgtgttccacatgccccgttgcctgttcgctggtcccctggctgagcagttcctgaaccaggtggacctgaccgagactctcgagcgttaccagcagcgtctgaacacttacgctctggtgtccaaggacctggcttcctaccgttccttcagccagcagctgaaggctcaggactccctgggcgagcagcccaccactgtgcctccccctatcgacctgtccatcccccacgtgtggatgcccccccagaccactcctcacggctggaccgagtcccacaccacctccggactgcaccgtccccacttcaaccagacctgcatcctgttcgacggtcacgacctgctgttctccaccgtgaccccctgcctgcaccagggcttctacctcatcgacgagctgcgttacgtgaagatcaccctgaccgaggatttcttcgtggtcaccgtgtccatcgacgacgacacccccatgctgctgatcttcggtcacctcccccgtgtgctgttcaaggctccctaccagcgtgacaacttcatcctgcgtcagaccgagaagcacgagctgctggtgctggtcaagaaggaccagctgaaccgtcactcttacctgaaggaccccgacttcctggacgctgctctggacttcaactacctggacctgtccgctctgctgaggaactccttccaccgttacgctgtggacgtgctgaagtccggtcgttgccagatgctggaccgtcgtaccgtcgagatggctttcgcttacgccctggctctgttcgctgctgctcgtcaagaagaggctggcgctcaggtgtccgtgccccgtgctctggaccgtcaggctgctctgctgcagatccaagagttcatgatcacttgcctgtcccagaccccccctcgtaccaccctgctgctgtaccccaccgctgtggacctggctaagcgtgctctgtggacccccaaccagatcaccgacatcacctccctcgtgcgtctggtgtacatcctgtccaagcagaaccagcagcacctgatcccccagtgggctctgcgtcagatcgctgacttcgctctgaagctgcacaagacccacctggcttcattcctcagcgctttcgctcgccaagagctgtacctgatgggttccctggtgcactccatgctggtgcacaccaccgagcgtcgcgagatcttcatcgtggaaaccggcctgtgctccctggccgagctgtcccacttcacccagctgctggctcacccccaccacgagtacctgtccgacctgtacaccccctgctcctcttccggtcgtcgtgaccactccctggaacgtctgacccgtctgttccccgacgctaccgtgcctaccaccgtgcctgctgctctgtccatcctgtctaccatgcagccctccaccctggaaaccttccccgacctgttctgcctgcctctgggcgagtccttctccgctctgaccgtgtccgagcacgtgtcctacgtggtcaccaaccagtacctgatcaagggcatctcctaccccgtgtccaccaccgtcgtgggccagtccctgatcatcacccagaccgactcccagaccaagtgcgagctgacccgtaacatgcacaccactcactccatcaccgctgctctgaacatctccctcgagaactgcgctttctgccagtccgctctgttggagtacgacgacactcagggtgtcatcaacatcatgtacatgcacgactccgacgacgtgctgttcgctctggacccctacaacgaggtggtggtgtcctccccccgtacccactacctgatgctgctgaagaacggcaccgtgctggaagtgaccgacgtggtggtggacgctaccgaccgtctgctgatgatgtccgtgtacgctctgtccgctatcatcggcatctacctgctgtaccgtatgctgaagacctgctaaggcgccaagctttgtcgagaagtactagagatcataatcagccataccacatttgtagaggttttacttgctttaaaaaacctcccacacctccccctgaacctgaaacataaaatgaatgcaattgttgttgttaacttgtttattgcagcttataatggttacaaataaagcaatagcatcacaaatttcacaaataaagcatttttttcactgcattctagttgtggtttgtccaaactcatcaatgtatcttatcatgtctggatctgatcactgcttgagcctagaagatccggctgctaacaaagcccgaaaggaagctgagttggctgctgccaccgctgagcaataactatcataacccctaggggcctctaaacgggtcttgaggggttttttgctgaaaggaggaactatatccggatctgaacaggagggacagctgatagaaacagaagccactggagcacctcaaaaacaccatcatacactaaatcagtaagttggcagcatcacccgacgcactttgcgccgaataaatacctgtgacggaagatcacttcgcagaataaataaatcctggtgtccctgttgataccgggaagccctgggccaacttttggcgaaaatgagacgttgatcggcacgtaagaggttccaactttcaccataatgaaataagatcactaccgggcgtattttttgagttatcgagattttcaggagctaaggaagctaaaatggagaaaaaaatcactggatataccaccgttgatatatcccaatggcatcgtaaagaacattttgaggcatttcagtcagttgctcaatgtacctataaccagaccgttcagctggatattacggcctttttaaagaccgtaaagaaaaataagcacaagttttatccggcctttattcacattcttgcccgcctgatgaatgctcatccggaattccgtatggcaatgaaagacggtgagctggtgatatgggatagtgttcacccttgttacaccgttttccatgagcaaactgaaacgttttcatcgctctggagtgaataccacgacgatttccggcagtttctacacatatattcgcaagatgtggcgtgttacggtgaaaacctggcctatttccctaaagggtttattgagaatatgtttttcgtctcagccaatccctgggtgagtttcaccagttttgatttaaacgtggccaatatggacaacttcttcgcccccgttttcaccatgggcaaatattatacgcaaggcgacaaggtgctgatgccgctggcgattcaggttcatcatgccgtttgtgatggcttccatgtcggcagaatgcttaatgaattacaacagtactgcgatgagtggcagggcggggcgtaatttttttaaggcagttattggtgcccttaaacgcctggttgctacgcctgaataagtgataataagcggatgaatggcagaaattcgaaagcaaattcgacccggtcgtcggttcagggcagggtcgttaaatagccgcttatgtctattgctggtttaccggtttattgactaccggaagcagtgtgaccgtgtgcttctcaaatgcctgaggccagtttgctcaggctctccccgtggaggtaataattgacgatatgatcatttattctgcctcccagctgacattcatccggggtcagcaccgtttctgcggactggctttctacgtgttccgcttcctttagcagcccttgcgccctgagtgcttgcggcagcgtgaagctaattctgtcagccgttaagtgttcctgtgtcactcaaaattgctttgagaggctctaagggcttctcagtgcgttacatccctggcttgttgtccacaaccgttaaaccttaaaagctttaaaagccttatatattcttttttttcttataaaacttaaaaccttagaggctatttaagttgctgatttatattaattttattgttcaaacatgagagcttagtacgtgaaacatgagagcttagtacgttagccatgagagcttagtacgttagccatgagggtttagttcgttaaacatgagagcttagtacgttaaacatgagagcttagtacgtgaaacatgagagcttagtacgtactatcaacaggttgaactgctgatcaacagatcctctacgcggccgcggtaccataacttcgtatagcatacattatacgaagttatctggtttaaacgtacccgtagtggctatggcagggcttgccgccccgacgttggctgcgagccctgggccttcacccgaacttgggggttggggtggggaaaaggaagaaacgcgggcgtattggtcccaatggggtctcggtggggtatcgacagagtgccagccctgggaccgaaccccgcgtttatgaacaaacgacccaacacccgtgcgttttattctgtctttttattgccgtcatagcgcgggttccttccggtattgtctccttccgtgtttcagttagcctcccccatctcccggtaccgcatgctatgcttagtgatggtggtggtgatggtggtggctgcctccccccccagacccccctccgccgcttcctttttcgaactgcgggtggctccagctacctccgccgggcccctggaacagaacttccagggcgccttagcgagcgtccacagcctggggaccgtaacgggagtgagcgggcaggttcacacgggtctgcttcagctcagggggcaggccagcgtagtacttgtccaggtgacgcagcaggggggggtccagctggtgacgcaggcagaattccttcacagcgttgtacaggccgtagaacagggtgataccctcgggagcagcagcggtggacacgggcagacgcacagcacggttggtacgggtagcctcgttacggatagccaccaccacgttgaacagggaggggggcaccagctcgaaacccagcacgtgttcggtgaagatggaacgaccgtaggacagacgagtcaggtcgtaaccacggcacaggtcgtccacgcaagtgtacacagcgggggaaccgtcgccgcactcggagtaaccgcgcatcacggtcatccaacggggagcggtgtcggaggacagcagggtcagcagagcacgcagctggtcggggttgttgtacagcagggccagggtgtccaggaaagcgtcgtccagcagcacggagttagcagcctcgggggtcacgggacggtaacggatcagctgggacaggggaccgtccctacgggtcacgttgaccaggggacgcagccaggactcgtacttgtcgccctggaacacctctcccagcaggcaacgacgggtcagctcggggcactcagcgggcaccttctcagccacggtgggagccacggacacggtagcggaggacacgatgggcagcagcaggcagcaccacagcagagccacgggaccgggggagaaggagaaaccgcagtcgggacgacggcacatggtggctcgagatcccgggtgatcaagtcttcgtcgagtgattgtaaataaaatgtaatttacagtatagtattttaattaatatacaaatgatttgataataattcttatttaactataatatattgtgttgggttgaattaaaggtccgtatactagtatcgattcgcgacctactccggaatattaatagatcatggagataattaaaatgataaccatctcgcaaataaataagtattttactgttttcgtaacagttttgtaataaaaaaacctataaatattccggattattcataccgtcccaccatcgggcgcggatccgccaccatgaactccaaggacctgacccccttcctgaccaccctgtggctgctgctggaccactcccgtgtgcctcgtgtgcgtgctgaggaatgctgcgaagtgatcaacgtgaaccacccccccgagcgctgctacgacttcaagatgtgcaacctgttcaccgtggctctgcgttgccccgacggcgaagtgtgctactcccccgaaaagaccgctgagatccgtggtatcgtgaccaccatgacccactccctgacccgtcaagtgatccacaacaagctgaccagctgcaactacaaccccctgtacctcgaggctgacggtcgtatccgttgcggcaaggtgtccgacaaggctcagtacctgctgggtgctgctggttccgtgccctaccgttggatcaacctcgagtacgacaagatcacccgtatcgtgggcctggaccagtacctcgagtccgtgaagaagcacaagcgtctggacgtgtgccgtgctaagatgggttacatgctgcagtaaaagcttgtcgagaagtactagaggatcataatcagccataccacatttgtagaggttttacttgctttaaaaaacctcccacacctccccctgaacctgaaacataaaatgaatgcaattgttgttgttaacttgtttattgcagcttataatggttacaaataaagcaatagcatcacaaatttcacaaataaagcatttttttcactgcattctagttgtggtttgtccaaactcatcaatgtatcttatcatgtctggatctgatcactgcttgagcctagaagatccggctgctaacaaagcccgaaaggaagctgagttggctgctgtggctagctttgtttaactttaagaaggagatacatctagaccggaatattaatagatcatggagataattaaaatgataaccatctcgcaaataaataagtattttactgttttcgtaacagttttgtaataaaaaaacctataaatattccggattattcataccgtcccaccatcgggcgcggatccgccaccatgctgcgtctgctgctgcgtcaccacttccactgcctgctgctgtgcgctgtgtgggctaccccctgcctggcttccccttggtccaccctgaccgctaaccagaacccctccccaccctggtccaagctgacctactccaagccccacgacgctgctaccttctactgccccttcctgtacccatccccccctcgttccccactgcagttctccggtttccagcgtgtgctgaccggtcccgagtgccgtaacgagactctgtacctgctgtacaaccgcgagggccagaccctggtcgagaggtcctccacctgggtcaagaaggtcatctggtacttgtccggtcgtaaccagaccatcctgcagcgtatgccccgtaccgcttccaagccctccgacggcaacgtgcagatctccgtcgaggacgctaagatcttcggtgctcacatggtgcccaagcagaccaagctgctgcgtttcgtggtcaacgacggcacccgttaccagatgtgcgtgatgaagctcgagtcctgggctcacgtgttccgtgactactccgtgtccttccaagtgcgcctgaccttcaccgaggctaacaaccagacctacaccttctgcacccaccccaacctgatcgtgtaaaagcttgtcgagaagtactagaggatcataatcagccataccacatttgtagaggttttacttgctttaaaaaacctcccacacctccccctgaacctgaaacataaaatgaatgcaattgttgttgttaacttgtttattgcagcttataatggttacaaataaagcaatagcatcacaaatttcacaaataaagcatttttttcactgcattctagttgtggtttgtccaaactcatcaatgtatcttatcatgtctggatctgatcactgcttgagcctagaagatccggctgctaacaaagcccgaaaggaagctgagttggctgctgggtgcctaatgagtgagctaactcacattaattgcccggaatattaatagatcatggagataattaaaatgataaccatctcgcaaataaataagtattttactgttttcgtaacagttttgtaataaaaaaacctataaatattccggattattcataccgtcccaccatcgggcgcggatccgccaccatgcgtctgtgccgtgtgtggctgtccgtgtgcctgtgcgctgtggtgctgggccagtgccagcgtgaaaccgctgagaagaacgactactaccgtgtgccccactactgggacgcttgctcccgtgctctgcccgaccagacccgttacaagtacgtcgagcagctggtggacctgaccctgaactaccactacgacgcttcccacggcctggacaacttcgacgtgctgaagcgtatcaacgtgaccgaggtgtccctgctgatctccgacttccgtcgtcagaaccgtcgtggtggcaccaacaagcgtaccaccttcaacgctgctggttccctggctccccacgctcgttccctcgagttctccgtgcgtctgttcgctaactaaaagcttgtcgagaagtactagaggatcataatcagccataccacatttgtagaggttttacttgctttaaaaaacctcccacacctccccctgaacctgaaacataaaatgaatgcaattgttgttgttaacttgtttattgcagcttataatggttacaaataaagcaatagcatcacaaatttcacaaataaagcatttttttcactgcattctagttgtggtttgtccaaactcatcaatgtatcttatcatgtctggatctgatcactgcttgagcctagaagatccggctgctaacaaagcccgaaaggaagctgagttggctgctgccaccgctgagcaataactatcataacccctaggagatccgaaccagataagtgaaatctagttccaaactattttgtcatttttaattttcgtattagcttacgacgctacacccagttcccatctattttgtcactcttccctaaataatccttaaaaactccatttccacccctcccagttcccaactattttgtccgcccaca

SEQ ID NO: 15 - DNA, 11338 bp, Artificial Sequence
  Synthetic construct
ttgttccagtttggaacaagagtccactattaaagaacgtggactccaacgtcaaagggcgaaaaaccgtctatcagggcgatggcccactacgtgaaccatcaccctaatcaagttttttggggtcgaggtgccgtaaagcactaaatcggaaccctaaagggagcccccgatttagagcttgacggggaaagccggcgaacgtggcgagaaaggaagggaagaaagcgaaaggagcgggcgctagggcgctggcaagtgtagcggtcacgctgcgcgtaaccaccacacccgccgcgcttaatgcgccgctacagggcgcgtccattcgccattcaggctgcgcaactgttgggaagggcgatcggtgcgggcctcttcgctattacgccagctggcgaaagggggatgtgctgcaaggcgattaagttgggtaacgccagggttttcccagtcacgacgttgtaaaacgacggccagtgcatagaccagccgcgtaacctggcaaaatcggttacggttgagtaataaatggatgccctgcgtaagcgggtgtgggcggacaataaagtcttaaactgaacaaaatagatctaaactatgacaataaagtcttaaactagacagaatagttgtaaactgaaatcagtccagttatgctgtgaaaaagcatactggacttttgttatggctaaagcaaactcttcattttctgaagtgcaaattgcccgtcgtattaaagaggggcgtggccaagggcatggtaaagactatattcgcggcgttgtgacaatttaccgaacaactccgcggccgggaagccgatctcggcttgaacgaattgttaggtggcggtacttgggtcgatatcaaagtgcatcacttcttcccgtatgcccaactttgtatagagagccactgcgggatcgtcaccgtaatctgcttgcacgtagatcacataagcaccaagcgcgttggcctcatgcttgaggagattgatgagcgcggtggcaatgccctgcctccggtgctcgccggagactgcgagatcatagatatagatctcactacgcggctgctcaaacttgggcagaacgtaagccgcgagagcgccaacaaccgcttcttggtcgaaggcagcaagcgcgatgaatgtcttactacggagcaagttcccgaggtaatcggagtccggctgatgttgggagtaggtggctacgtctccgaactcacgaccgaaaagatcaagagcagcccgcatggatttgacttggtcagggccgagcctacatgtgcgaatgatgcccatacttgagccacctaactttgttttagggcgactgccctgctgcgtaacatcgttgctgctgcgtaacatcgttgctgctccataacatcaaacatcgacccacggcgtaacgcgcttgctgcttggatgcccgaggcatagactgtacaaaaaaacagtcataacaagccatgaaaaccgccactgcgccgttaccaccgctgcgttcggtcaaggttctggaccagttgcgtgagcgcatacgctacttgcattacagtttacgaaccgaacaggcttatgtcaactgggtttgtgccttcatccgtttccacggtgtgcgtcacccggcaaccttgggcagcagcgaagtcgaggcatttctgtcctggctggcgaacgagcgcaaggtttcggtctccacgcatcgtcaggcattggcggccttgctgttcttctacggcaaggtgctgtgcacggatctgcccttgcttcaggagatcggtagacctcggccgtcgcggcgcttgccggtggtgctgaccccggatgaagtggttcgcatcctcggttttctggaaggcgagcatcgtttgttcgcccaggactctagctatagttctagtggttggctacagctttgtttgtactatcaacaggttgaactgctgatcaacagatcctctacgcggccgcggtaccataacttcgtatagcatacattatacgaagttatctggttttactagtatcgattcgcgacctactccggaatattaatagatcatggagataattaaaatgataaccatctcgcaaataaataagtattttactgttttcgtaacagttttgtaataaaaaaacctataaatattccggattattcataccgtcccaccatcgggcgcggatccgccaccatgcgtcccggcctgccctcctacctgatcgtgctggctgtgtgcctgctgtcccacctcctgtcctcccgttacggtgctgaggctatctccgagcccctggacaaggctttccacctcctgctgaacacctacggtcgtcctatccgtttcctgcgcgagaacaccacccagtgcacctacaactcctccctgcgcaactccaccgtcgtccgcgagaacgctatctccttcaacttcttccagtcctacaaccagtactacgtgttccacatgccccgttgcctgttcgctggtcccctggctgagcagttcctgaaccaggtggacctgaccgagactctcgagcgttaccagcagcgtctgaacacttacgctctggtgtccaaggacctggcttcctaccgttccttcagccagcagctgaaggctcaggactccctgggcgagcagcccaccactgtgcctccccctatcgacctgtccatcccccacgtgtggatgcccccccagaccactcctcacggctggaccgagtcccacaccacctccggactgcaccgtccccacttcaaccagacctgcatcctgttcgacggtcacgacctgctgttctccaccgtgaccccctgcctgcaccagggcttctacctcatcgacgagctgcgttacgtgaagatcaccctgaccgaggatttcttcgtggtcaccgtgtccatcgacgacgacacccccatgctgctgatcttcggtcacctcccccgtgtgctgttcaaggctccctaccagcgtgacaacttcatcctgcgtcagaccgagaagcacgagctgctggtgctggtcaagaaggaccagctgaaccgtcactcttacctgaaggaccccgacttcctggacgctgctctggacttcaactacctggacctgtccgctctgctgaggaactccttccaccgttacgctgtggacgtgctgaagtccggtcgttgccagatgctggaccgtcgtaccgtcgagatggctttcgcttacgccctggctctgttcgctgctgctcgtcaagaagaggctggcgctcaggtgtccgtgccccgtgctctggaccgtcaggctgctctgctgcagatccaagagttcatgatcacttgcctgtcccagaccccccctcgtaccaccctgctgctgtaccccaccgctgtggacctggctaagcgtgctctgtggacccccaaccagatcaccgacatcacctccctcgtgcgtctggtgtacatcctgtccaagcagaaccagcagcacctgatcccccagtgggctctgcgtcagatcgctgacttcgctctgaagctgcacaagacccacctggcttcattcctcagcgctttcgctcgccaagagctgtacctgatgggttccctggtgcactccatgctggtgcacaccaccgagcgtcgcgagatcttcatcgtggaaaccggcctgtgctccctggccgagctgtcccacttcacccagctgctggctcacccccaccacgagtacctgtccgacctgtacaccccctgctcctcttccggtcgtcgtgaccactccctggaacgtctgacccgtctgttccccgacgctaccgtgcctaccaccgtgcctgctgctctgtccatcctgtctaccatgcagccctccaccctggaaaccttccccgacctgttctgcctgcctctgggcgagtccttctccgctctgaccgtgtccgagcacgtgtcctacgtggtcaccaaccagtacctgatcaagggcatctcctaccccgtgtccaccaccgtcgtgggccagtccctgatcatcacccagaccgactcccagaccaagtgcgagctgacccgtaacatgcacaccactcactccatcaccgctgctctgaacatctccctcgagaactgcgctttctgccagtccgctctgttggagtacgacgacactcagggtgtcatcaacatcatgtacatgcacgactccgacgacgtgctgttcgctctggacccctacaacgaggtggtggtgtcctccccccgtacccactacctgatgctgctgaagaacggcaccgtgctggaagtgaccgacgtggtggtggacgctaccgaccgtctgctgatgatgtccgtgtacgctctgtccgctatcatcggcatctacctgctgtaccgtatgctgaagacctgctaaggcgccaagctttgtcgagaagtactagaggatcataatcagccataccacatttgtagaggttttacttgctttaaaaaacctcccacacctccccctgaacctgaaacataaaatgaatgcaattgttgttgttaacttgtttattgcagcttataatggttacaaataaagcaatagcatcacaaatttcacaaataaagcatttttttcactgcattctagttgtggtttgtccaaactcatcaatgtatcttatcatgtctggatctgatcactgcttgagcctagaagatccggctgctaacaaagcccgaaaggaagctgagttggctgctgccaccgctgagcaataactatcataacccctaggggcctctaaacgggtcttgaggggttttttgctgaaaggaggaactatatccggatctgaacaggagggacagctgatagaaacagaagccactggagcacctcaaaaacaccatcatacactaaatcagtaagttggcagcatcacccgacgcactttgcgccgaataaatacctgtgacggaagatcacttcgcagaataaataaatcctggtgtccctgttgataccgggaagccctgggccaacttttggcgaaaatgagacgttgatcggcacgtaagaggttccaactttcaccataatgaaataagatcactaccgggcgtattttttgagttatcgagattttcaggagctaaggaagctaaaatggagaaaaaaatcactggatataccaccgttgatatatcccaatggcatcgtaaagaacattttgaggcatttcagtcagttgctcaatgtacctataaccagaccgttcagctggatattacggcctttttaaagaccgtaaagaaaaataagcacaagttttatccggcctttattcacattcttgcccgcctgatgaatgctcatccggaattccgtatggcaatgaaagacggtgagctggtgatatgggatagtgttcacccttgttacaccgttttccatgagcaaactgaaacgttttcatcgctctggagtgaataccacgacgatttccggcagtttctacacatatattcgcaagatgtggcgtgttacggtgaaaacctggcctatttccctaaagggtttattgagaatatgtttttcgtctcagccaatccctgggtgagtttcaccagttttgatttaaacgtggccaatatggacaacttcttcgcccccgttttcaccatgggcaaatattatacgcaaggcgacaaggtgctgatgccgctggcgattcaggttcatcatgccgtttgtgatggcttccatgtcggcagaatgcttaatgaattacaacagtactgcgatgagtggcagggcggggcgtaatttttttaaggcagttattggtgcccttaaacgcctggttgctacgcctgaataagtgataataagcggatgaatggcagaaattcgaaagcaaattcgacccggtcgtcggttcagggcagggtcgttaaatagccgcttatgtctattgctggtttaccggtttattgactaccggaagcagtgtgaccgtgtgcttctcaaatgcctgaggccagtttgctcaggctctccccgtggaggtaataattgacgatatgatcatttattctgcctcccagctgacattcatccggggtcagcaccgtttctgcggactggctttctacgtgttccgcttcctttagcagcccttgcgccctgagtgcttgcggcagcgtgaagctaattctgtcagccgttaagtgttcctgtgtcactcaaaattgctttgagaggctctaagggcttctcagtgcgttacatccctggcttgttgtccacaaccgttaaaccttaaaagctttaaaagccttatatattcttttttttcttataaaacttaaaaccttagaggctatttaagttgctgatttatattaattttattgttcaaacatgagagcttagtacgtgaaacatgagagcttagtacgttagccatgagagcttagtacgttagccatgagggtttagttcgttaaacatgagagcttagtacgttaaacatgagagcttagtacgtgaaacatgagagcttagtacgtactatcaacaggttgaactgctgatcaacagatcctctacgcggccgcggtaccataacttcgtatagcatacattatacgaagttatctggtttaaacgtacccgtagtggctatggcagggcttgccgccccgacgttggctgcgagccctgggccttcacccgaacttgggggttggggtggggaaaaggaagaaacgcgggcgtattggtcccaatggggtctcggtggggtatcgacagagtgccagccctgggaccgaaccccgcgtttatgaacaaacgacccaacacccgtgcgttttattctgtctttttattgccgtcatagcgcgggttccttccggtattgtctccttccgtgtttcagttagcctcccccatctcccggtaccgcatgctatgcatcagctgctagcttagcgagcgtccacagcctggggaccgtaacgggagtgagcgggcaggttcacacgggtctgcttcagctcagggggcaggccagcgtagtacttgtccaggtgacgcagcaggggggggtccagctggtgacgcaggcagaattccttcacagcgttgtacaggccgtagaacagggtgataccctcgggagcagcagcggtggacacgggcagacgcacagcacggttggtacgggtagcctcgttacggatagccaccaccacgttgaacagggaggggggcaccagctcgaaacccagcacgtgttcggtgaagatggaacgaccgtaggacagacgagtcaggtcgtaaccacggcacaggtcgtccacgcaagtgtacacagcgggggaaccgtcgccgcactcggagtaaccgcgcatcacggtcatccaacggggagcggtgtcggaggacagcagggtcagcagagcacgcagctggtcggggttgttgtacagcagggccagggtgtccaggaaagcgtcgtccagcagcacggagttagcagcctcgggggtcacgggacggtaacggatcagctgggacaggggaccgtccctacgggtcacgttgaccaggggacgcagccaggactcgtacttgtcgccctggaacacctctcccagcaggcaacgacgggtcagctcggggcactcagcgggcaccttctcagccacggtgggagccacggacacggtagcggaggacacgatgggcagcagcaggcagcaccacagcagagccacgggaccgggggagaaggagaaaccgcagtcgggacgacggcacatggtggctcgagatcccgggtgatcaagtcttcgtcgagtgattgtaaataaaatgtaatttacagtatagtattttaattaatatacaaatgatttgataataattcttatttaactataatatattgtgttgggttgaattaaaggtccgtatactagtatcgattcgcgacctactccggaatattaatagatcatggagataattaaaatgataaccatctcgcaaataaataagtattttactgttttcgtaacagttttgtaataaaaaaacctataaatattccggattattcataccgtcccaccatcgggcgcggatccgccaccatgtcccccaagaacctgacccccttcctgaccgctctgtggctgctgctgggccactcccgtgtgcctcgtgtgcgtgctgaggaatgctgcgagttcatcaacgtgaaccacccccccgagcgctgctacgacttcaagatgtgcaaccgtttcaccgtggctctgcgttgccccgacggcgaagtgtgctactcccccgaaaagaccgctgagatccgtggtatcgtgaccaccatgacccactccctgacccgtcaggtggtgcacaacaagctgacctcttgcaactacaaccccctgtacctcgaggctgacggtcgtatccgttgcggcaaggtcaacgacaaggctcagtacctgctgggtgctgctggttccgtgccctaccgttggatcaacctcgagtacgacaagatcacccgtatcgtgggcctggaccagtacctcgagtccgtgaagaagcacaagcgtctggacgtgtgccgtgctaagatgggttacatgctgcagtaaaagcttgtcgagaagtactagaggatcataatcagccataccacatttgtagaggttttacttgctttaaaaaacctcccacacctccccctgaacctgaaacataaaatgaatgcaattgttgttgttaacttgtttattgcagcttataatggttacaaataaagcaatagcatcacaaatttcacaaataaagcatttttttcactgcattctagttgtggtttgtccaaactcatcaatgtatcttatcatgtctggatctgatcactgcttgagcctagaagatccggctgctaacaaagcccgaaaggaagctgagttggctgctgtggctagctttgtttaactttaagaaggagatacatctagaccggaatattaatagatcatggagataattaaaatgataaccatctcgcaaataaataagtattttactgttttcgtaacagttttgtaataaaaaaacctataaatattccggattattcataccgtcccaccatcgggcgcggatccgccaccatgctgcgtctgctgctgcgtcaccacttccactgcctgctgctgtgcgctgtgtgggctaccccctgcctggcttccccctggttcaccctgaccgctaaccagaacccctccccaccctggtccaagctgacctaccccaagccccacgacgctgctaccttctactgccccttcctgtacccatccccacctcgttccccatcccagttctccggtttccagcgtgtgtccaccggtcccgagtgccgtaacgagactctgtacctgctgtacaaccgcgagggccagaccctggtcgagaggtcctccacctgggtcaagaaggtcatctggtacttgtccggtcgtaaccagaccatcctgcagcgtatgccccgtaccgcttccaagccctccgacggcaacgtgcagatctccgtcgaggacgctaagatcttcggtgctcacatggtgcccaagcagaccaagctgctgcgtttcgtggtcaacgacggcacccgttaccagatgtgcgtgatgaagctggaatcctgggctcacgtgttccgtgactactccgtgtccttccaagtgcgcctgaccttcaccgaggctaacaaccagacctacaccttctgcacccaccccaacctgatcgtgtaagtcgacaagcttgtcgagaagtactagaggatcataatcagccataccacatttgtagaggttttacttgctttaaaaaacctcccacacctccccctgaacctgaaacataaaatgaatgcaattgttgttgttaacttgtttattgcagcttataatggttacaaataaagcaatagcatcacaaatttcacaaataaagcatttttttcactgcattctagttgtggtttgtccaaactcatcaatgtatcttatcatgtctggatctgatcactgcttgagcctagaagatccggctgctaacaaagcccgaaaggaagctgagttggctgctgggtgcctaatgagtgagctaactcacattaattgcccggaatattaatagatcatggagataattaaaatgataaccatctcgcaaataaataagtattttactgttttcgtaacagttttgtaataaaaaaacctataaatattccggattattcataccgtcccaccatcgggcgcggatccgccaccggatccgccaccatgcgtctgtgccgtgtgtggctgtccgtgtgcctgtgcgctgtggtgctgggacagtgccagcgtgaaaccgctgagaagaacgactactaccgtgtgccccactactgggacgcttgctcccgtgctctgcccgaccagacccgttacaagtacgtcgagcagctggtggacctgaccctgaactaccactacgacgcttcccacggcctggacaacttcgacgtgctgaagcgtatcaacgtgaccgaggtgtccctgctgatctccgacttccgtcgtcagaaccgtcgtggtggcaccaacaagcgtaccaccttcaacgctgctggttccctggctccccacgctcgttccttggagttctccgtgcgtctgttcgccaactaataaaagcttgtcgagaagtactagaggatcataatcagccataccacatttgtagaggttttacttgctttaaaaaacctcccacacctccccctgaacctgaaacataaaatgaatgcaattgttgttgttaacttgtttattgcagcttataatggttacaaataaagcaatagcatcacaaatttcacaaataaagcatttttttcactgcattctagttgtggtttgtccaaactcatcaatgtatcttatcatgtctggatctgatcactgcttgagcctagaagatccggctgctaacaaagcccgaaaggaagctgagttggctgctgccaccgctgagcaataactatcataacccctaggagatccgaaccagataagtgaaatctagttccaaactattttgtcatttttaattttcgtattagcttacgacgctacacccagttcccatctattttgtcactcttccctaaataatccttaaaaactccatttccacccctcccagttcccaactattttgtccgcccaca

SEQ ID NO: 16 - DNA, 11338 bp, Artificial Sequence
  Synthetic construct
ttgttccagtttggaacaagagtccactattaaagaacgtggactccaacgtcaaagggcgaaaaaccgtctatcagggcgatggcccactacgtgaaccatcaccctaatcaagttttttggggtcgaggtgccgtaaagcactaaatcggaaccctaaagggagcccccgatttagagcttgacggggaaagccggcgaacgtggcgagaaaggaagggaagaaagcgaaaggagcgggcgctagggcgctggcaagtgtagcggtcacgctgcgcgtaaccaccacacccgccgcgcttaatgcgccgctacagggcgcgtccattcgccattcaggctgcgcaactgttgggaagggcgatcggtgcgggcctcttcgctattacgccagctggcgaaagggggatgtgctgcaaggcgattaagttgggtaacgccagggttttcccagtcacgacgttgtaaaacgacggccagtgcatagaccagccgcgtaacctggcaaaatcggttacggttgagtaataaatggatgccctgcgtaagcgggtgtgggcggacaataaagtcttaaactgaacaaaatagatctaaactatgacaataaagtcttaaactagacagaatagttgtaaactgaaatcagtccagttatgctgtgaaaaagcatactggacttttgttatggctaaagcaaactcttcattttctgaagtgcaaattgcccgtcgtattaaagaggggcgtggccaagggcatggtaaagactatattcgcggcgttgtgacaatttaccgaacaactccgcggccgggaagccgatctcggcttgaacgaattgttaggtggcggtacttgggtcgatatcaaagtgcatcacttcttcccgtatgcccaactttgtatagagagccactgcgggatcgtcaccgtaatctgcttgcacgtagatcacataagcaccaagcgcgttggcctcatgcttgaggagattgatgagcgcggtggcaatgccctgcctccggtgctcgccggagactgcgagatcatagatatagatctcactacgcggctgctcaaacttgggcagaacgtaagccgcgagagcgccaacaaccgcttcttggtcgaaggcagcaagcgcgatgaatgtcttactacggagcaagttcccgaggtaatcggagtccggctgatgttgggagtaggtggctacgtctccgaactcacgaccgaaaagatcaagagcagcccgcatggatttgacttggtcagggccgagcctacatgtgcgaatgatgcccatacttgagccacctaactttgttttagggcgactgccctgctgcgtaacatcgttgctgctgcgtaacatcgttgctgctccataacatcaaacatcgacccacggcgtaacgcgcttgctgcttggatgcccgaggcatagactgtacaaaaaaacagtcataacaagccatgaaaaccgccactgcgccgttaccaccgctgcgttcggtcaaggttctggaccagttgcgtgagcgcatacgctacttgcattacagtttacgaaccgaacaggcttatgtcaactgggtttgtgccttcatccgtttccacggtgtgcgtcacccggcaaccttgggcagcagcgaagtcgaggcatttctgtcctggctggcgaacgagcgcaaggtttcggtctccacgcatcgtcaggcattggcggccttgctgttcttctacggcaaggtgctgtgcacggatctgcccttgcttcaggagatcggtagacctcggccgtcgcggcgcttgccggtggtgctgaccccggatgaagtggttcgcatcctcggttttctggaaggcgagcatcgtttgttcgcccaggactctagctatagttctagtggttggctacagctttgtttgtactatcaacaggttgaactgctgatcaacagatcctctacgcggccgcggtaccataacttcgtatagcatacattatacgaagttatctggttttactagtatcgattcgcgacctactccggaatattaatagatcatggagataattaaaatgataaccatctcgcaaataaataagtattttactgttttcgtaacagttttgtaataaaaaaacctataaatattccggattattcataccgtcccaccatcgggcgcggatccgccaccatgcgtcccggcctgccctcctacctgatcgtgctggctgtgtgcctgctgtcccacctcctgtcctcccgttacggtgctgaggctatctccgagcccctggacaaggctttccacctcctgctgaacacctacggtcgtcctatccgtttcctgcgcgagaacaccacccagtgcacctacaactcctccctgcgcaactccaccgtcgtccgcgagaacgctatctccttcaacttcttccagtcctacaaccagtactacgtgttccacatgccccgttgcctgttcgctggtcccctggctgagcagttcctgaaccaggtggacctgaccgagactctcgagcgttaccagcagcgtctgaacacttacgctctggtgtccaaggacctggcttcctaccgttccttcagccagcagctgaaggctcaggactccctgggcgagcagcccaccactgtgcctccccctatcgacctgtccatcccccacgtgtggatgcccccccagaccactcctcacggctggaccgagtcccacaccacctccggactgcaccgtccccacttcaaccagacctgcatcctgttcgacggtcacgacctgctgttctccaccgtgaccccctgcctgcaccagggcttctacctcatcgacgagctgcgttacgtgaagatcaccctgaccgaggatttcttcgtggtcaccgtgtccatcgacgacgacacccccatgctgctgatcttcggtcacctcccccgtgtgctgttcaaggctccctaccagcgtgacaacttcatcctgcgtcagaccgagaagcacgagctgctggtgctggtcaagaaggaccagctgaaccgtcactcttacctgaaggaccccgacttcctggacgctgctctggacttcaactacctggacctgtccgctctgctgaggaactccttccaccgttacgctgtggacgtgctgaagtccggtcgttgccagatgctggaccgtcgtaccgtcgagatggctttcgcttacgccctggctctgttcgctgctgctcgtcaagaagaggctggcgctcaggtgtccgtgccccgtgctctggaccgtcaggctgctctgctgcagatccaagagttcatgatcacttgcctgtcccagaccccccctcgtaccaccctgctgctgtaccccaccgctgtggacctggctaagcgtgctctgtggacccccaaccagatcaccgacatcacctccctcgtgcgtctggtgtacatcctgtccaagcagaaccagcagcacctgatcccccagtgggctctgcgtcagatcgctgacttcgctctgaagctgcacaagacccacctggcttcattcctcagcgctttcgctcgccaagagctgtacctgatgggttccctggtgcactccatgctggtgcacaccaccgagcgtcgcgagatcttcatcgtggaaaccggcctgtgctccctggccgagctgtcccacttcacccagctgctggctcacccccaccacgagtacctgtccgacctgtacaccccctgctcctcttccggtcgtcgtgaccactccctggaacgtctgacccgtctgttccccgacgctaccgtgcctaccaccgtgcctgctgctctgtccatcctgtctaccatgcagccctccaccctggaaaccttccccgacctgttctgcctgcctctgggcgagtccttctccgctctgaccgtgtccgagcacgtgtcctacgtggtcaccaaccagtacctgatcaagggcatctcctaccccgtgtccaccaccgtcgtgggccagtccctgatcatcacccagaccgactcccagaccaagtgcgagctgacccgtaacatgcacaccactcactccatcaccgctgctctgaacatctccctcgagaactgcgctttctgccagtccgctctgttggagtacgacgacactcagggtgtcatcaacatcatgtacatgcacgactccgacgacgtgctgttcgctctggacccctacaacgaggtggtggtgtcctccccccgtacccactacctgatgctgctgaagaacggcaccgtgctggaagtgaccgacgtggtggtggacgctaccgaccgtctgctgatgatgtccgtgtacgctctgtccgctatcatcggcatctacctgctgtaccgtatgctgaagacctgctaaggcgccaagctttgtcgagaagtactagaggatcataatcagccataccacatttgtagaggttttacttgctttaaaaaacctcccacacctccccctgaacctgaaacataaaatgaatgcaattgttgttgttaacttgtttattgcagcttataatggttacaaataaagcaatagcatcacaaatttcacaaataaagcatttttttcactgcattctagttgtggtttgtccaaactcatcaatgtatcttatcatgtctggatctgatcactgcttgagcctagaagatccggctgctaacaaagcccgaaaggaagctgagttggctgctgccaccgctgagcaataactatcataacccctaggggcctctaaacgggtcttgaggggttttttgctgaaaggaggaactatatccggatctgaacaggagggacagctgatagaaacagaagccactggagcacctcaaaaacaccatcatacactaaatcagtaagttggcagcatcacccgacgcactttgcgccgaataaatacctgtgacggaagatcacttcgcagaataaataaatcctggtgtccctgttgataccgggaagccctgggccaacttttggcgaaaatgagacgttgatcggcacgtaagaggttccaactttcaccataatgaaataagatcactaccgggcgtattttttgagttatcgagattttcaggagctaaggaagctaaaatggagaaaaaaatcactggatataccaccgttgatatatcccaatggcatcgtaaagaacattttgaggcatttcagtcagttgctcaatgtacctataaccagaccgttcagctggatattacggcctttttaaagaccgtaaagaaaaataagcacaagttttatccggcctttattcacattcttgcccgcctgatgaatgctcatccggaattccgtatggcaatgaaagacggtgagctggtgatatgggatagtgttcacccttgttacaccgttttccatgagcaaactgaaacgttttcatcgctctggagtgaataccacgacgatttccggcagtttctacacatatattcgcaagatgtggcgtgttacggtgaaaacctggcctatttccctaaagggtttattgagaatatgtttttcgtctcagccaatccctgggtgagtttcaccagttttgatttaaacgtggccaatatggacaacttcttcgcccccgttttcaccatgggcaaatattatacgcaaggcgacaaggtgctgatgccgctggcgattcaggttcatcatgccgtttgtgatggcttccatgtcggcagaatgcttaatgaattacaacagtactgcgatgagtggcagggcggggcgtaatttttttaaggcagttattggtgcccttaaacgcctggttgctacgcctgaataagtgataataagcggatgaatggcagaaattcgaaagcaaattcgacccggtcgtcggttcagggcagggtcgttaaatagccgcttatgtctattgctggtttaccggtttattgactaccggaagcagtgtgaccgtgtgcttctcaaatgcctgaggccagtttgctcaggctctccccgtggaggtaataattgacgatatgatcatttattctgcctcccagctgacattcatccggggtcagcaccgtttctgcggactggctttctacgtgttccgcttcctttagcagcccttgcgccctgagtgcttgcggcagcgtgaagctaattctgtcagccgttaagtgttcctgtgtcactcaaaattgctttgagaggctctaagggcttctcagtgcgttacatccctggcttgttgtccacaaccgttaaaccttaaaagctttaaaagccttatatattcttttttttcttataaaacttaaaaccttagaggctatttaagttgctgatttatattaattttattgttcaaacatgagagcttagtacgtgaaacatgagagcttagtacgttagccatgagagcttagtacgttagccatgagggtttagttcgttaaacatgagagcttagtacgttaaacatgagagcttagtacgtgaaacatgagagcttagtacgtactatcaacaggttgaactgctgatcaacagatcctctacgcggccgcggtaccataacttcgtatagcatacattatacgaagttatctggtttaaacgtacccgtagtggctatggcagggcttgccgccccgacgttggctgcgagccctgggccttcacccgaacttgggggttggggtggggaaaaggaagaaacgcgggcgtattggtcccaatggggtctcggtggggtatcgacagagtgccagccctgggaccgaaccccgcgtttatgaacaaacgacccaacacccgtgcgttttattctgtctttttattgccgtcatagcgcgggttccttccggtattgtctccttccgtgtttcagttagcctcccccatctcccggtaccgcatgctatgcatcagctgctagcttagcgagcgtccacagcctggggaccgtaacgggagtgagcgggcaggttcacacgggtctgcttcagctcagggggcaggccagcgtagtacttgtccaggtgacgcagcaggggggggtccagctggtgacgcaggcagaattccttcacagcgttgtacaggccgtagaacagggtgataccctcgggagcagcagcggtggacacgggcagacgcacagcacggttggtacgggtagcctcgttacggatagccaccaccacgttgaacagggaggggggcaccagctcgaaacccagcacgtgttcggtgaagatggaacgaccgtaggacagacgagtcaggtcgtaaccacggcacaggtcgtccacgcaagtgtacacagcgggggaaccgtcgccgcactcggagtaaccgcgcatcacggtcatccaacggggagcggtgtcggaggacagcagggtcagcagagcacgcagctggtcggggttgttgtacagcagggccagggtgtccaggaaagcgtcgtccagcagcacggagttagcagcctcgggggtcacgggacggtaacggatcagctgggacaggggaccgtccctacgggtcacgttgaccaggggacgcagccaggactcgtacttgtcgccctggaacacctctcccagcaggcaacgacgggtcagctcggggcactcagcgggcaccttctcagccacggtgggagccacggacacggtagcggaggacacgatgggcagcagcaggcagcaccacagcagagccacgggaccgggggagaaggagaaaccgcagtcgggacgacggcacatggtggctcgagatcccgggtgatcaagtcttcgtcgagtgattgtaaataaaatgtaatttacagtatagtattttaattaatatacaaatgatttgataataattcttatttaactataatatattgtgttgggttgaattaaaggtccgtatactagtatcgattcgcgacctactccggaatattaatagatcatggagataattaaaatgataaccatctcgcaaataaataagtattttactgttttcgtaacagttttgtaataaaaaaacctataaatattccggattattcataccgtcccaccatcgggcgcggatccgccaccatgaactccaaggacctgacccccttcctgaccaccctgtggctgctgctggaccactcccgtgtgcctcgtgtgcgtgctgaggaatgctgcgaagtgatcaacgtgaaccacccccccgagcgctgctacgacttcaagatgtgcaacctgttcaccgtggctctgcgttgccccgacggcgaagtgtgctactcccccgaaaagaccgctgagatccgtggtatcgtgaccaccatgacccactccctgacccgtcaagtgatccacaacaagctgaccagctgcaactacaaccccctgtacctcgaggctgacggtcgtatccgttgcggcaaggtgtccgacaaggctcagtacctgctgggtgctgctggttccgtgccctaccgttggatcaacctcgagtacgacaagatcacccgtatcgtgggcctggaccagtacctcgagtccgtgaagaagcacaagcgtctggacgtgtgccgtgctaagatgggttacatgctgcagtaaaagcttgtcgagaagtactagaggatcataatcagccataccacatttgtagaggttttacttgctttaaaaaacctcccacacctccccctgaacctgaaacataaaatgaatgcaattgttgttgttaacttgtttattgcagcttataatggttacaaataaagcaatagcatcacaaatttcacaaataaagcatttttttcactgcattctagttgtggtttgtccaaactcatcaatgtatcttatcatgtctggatctgatcactgcttgagcctagaagatccggctgctaacaaagcccgaaaggaagctgagttggctgctgtggctagctttgtttaactttaagaaggagatacatctagaccggaatattaatagatcatggagataattaaaatgataaccatctcgcaaataaataagtattttactgttttcgtaacagttttgtaataaaaaaacctataaatattccggattattcataccgtcccaccatcgggcgcggatccgccaccatgctgcgtctgctgctgcgtcaccacttccactgcctgctgctgtgcgctgtgtgggctaccccctgcctggcttccccctggttcaccctgaccgctaaccagaacccctccccaccctggtccaagctgacctaccccaagccccacgacgctgctaccttctactgccccttcctgtacccatccccacctcgttccccatcccagttctccggtttccagcgtgtgtccaccggtcccgagtgccgtaacgagactctgtacctgctgtacaaccgcgagggccagaccctggtcgagaggtcctccacctgggtcaagaaggtcatctggtacttgtccggtcgtaaccagaccatcctgcagcgtatgccccgtaccgcttccaagccctccgacggcaacgtgcagatctccgtcgaggacgctaagatcttcggtgctcacatggtgcccaagcagaccaagctgctgcgtttcgtggtcaacgacggcacccgttaccagatgtgcgtgatgaagctggaatcctgggctcacgtgttccgtgactactccgtgtccttccaagtgcgcctgaccttcaccgaggctaacaaccagacctacaccttctgcacccaccccaacctgatcgtgtaagtcgacaagcttgtcgagaagtactagaggatcataatcagccataccacatttgtagaggttttacttgctttaaaaaacctcccacacctccccctgaacctgaaacataaaatgaatgcaattgttgttgttaacttgtttattgcagcttataatggttacaaataaagcaatagcatcacaaatttcacaaataaagcatttttttcactgcattctagttgtggtttgtccaaactcatcaatgtatcttatcatgtctggatctgatcactgcttgagcctagaagatccggctgctaacaaagcccgaaaggaagctgagttggctgctgggtgcctaatgagtgagctaactcacattaattgcccggaatattaatagatcatggagataattaaaatgataaccatctcgcaaataaataagtattttactgttttcgtaacagttttgtaataaaaaaacctataaatattccggattattcataccgtcccaccatcgggcgcggatccgccaccggatccgccaccatgcgtctgtgccgtgtgtggctgtccgtgtgcctgtgcgctgtggtgctgggacagtgccagcgtgaaaccgctgagaagaacgactactaccgtgtgccccactactgggacgcttgctcccgtgctctgcccgaccagacccgttacaagtacgtcgagcagctggtggacctgaccctgaactaccactacgacgcttcccacggcctggacaacttcgacgtgctgaagcgtatcaacgtgaccgaggtgtccctgctgatctccgacttccgtcgtcagaaccgtcgtggtggcaccaacaagcgtaccaccttcaacgctgctggttccctggctccccacgctcgttccttggagttctccgtgcgtctgttcgccaactaataaaagcttgtcgagaagtactagaggatcataatcagccataccacatttgtagaggttttacttgctttaaaaaacctcccacacctccccctgaacctgaaacataaaatgaatgcaattgttgttgttaacttgtttattgcagcttataatggttacaaataaagcaatagcatcacaaatttcacaaataaagcatttttttcactgcattctagttgtggtttgtccaaactcatcaatgtatcttatcatgtctggatctgatcactgcttgagcctagaagatccggctgctaacaaagcccgaaaggaagctgagttggctgctgccaccgctgagcaataactatcataacccctaggagatccgaaccagataagtgaaatctagttccaaactattttgtcatttttaattttcgtattagcttacgacgctacacccagttcccatctattttgtcactcttccctaaataatccttaaaaactccatttccacccctcccagttcccaactattttgtccgcccaca

SEQ ID NO: 17 - DNA, 9952 bp, Artificial Sequence
  Synthetic construct
ttgttccagtttggaacaagagtccactattaaagaacgtggactccaacgtcaaagggcgaaaaaccgtctatcagggcgatggcccactacgtgaaccatcaccctaatcaagttttttggggtcgaggtgccgtaaagcactaaatcggaaccctaaagggagcccccgatttagagcttgacggggaaagccggcgaacgtggcgagaaaggaagggaagaaagcgaaaggagcgggcgctagggcgctggcaagtgtagcggtcacgctgcgcgtaaccaccacacccgccgcgcttaatgcgccgctacagggcgcgtccattcgccattcaggctgcgcaactgttgggaagggcgatcggtgcgggcctcttcgctattacgccagctggcgaaagggggatgtgctgcaaggcgattaagttgggtaacgccagggttttcccagtcacgacgttgtaaaacgacggccagtgcatagaccagccgcgtaacctggcaaaatcggttacggttgagtaataaatggatgccctgcgtaagcgggtgtgggcggacaataaagtcttaaactgaacaaaatagatctaaactatgacaataaagtcttaaactagacagaatagttgtaaactgaaatcagtccagttatgctgtgaaaaagcatactggacttttgttatggctaaagcaaactcttcattttctgaagtgcaaattgcccgtcgtattaaagaggggcgtggccaagggcatggtaaagactatattcgcggcgttgtgacaatttaccgaacaactccgcggccgggaagccgatctcggcttgaacgaattgttaggtggcggtacttgggtcgatatcaaagtgcatcacttcttcccgtatgcccaactttgtatagagagccactgcgggatcgtcaccgtaatctgcttgcacgtagatcacataagcaccaagcgcgttggcctcatgcttgaggagattgatgagcgcggtggcaatgccctgcctccggtgctcgccggagactgcgagatcatagatatagatctcactacgcggctgctcaaacttgggcagaacgtaagccgcgagagcgccaacaaccgcttcttggtcgaaggcagcaagcgcgatgaatgtcttactacggagcaagttcccgaggtaatcggagtccggctgatgttgggagtaggtggctacgtctccgaactcacgaccgaaaagatcaagagcagcccgcatggatttgacttggtcagggccgagcctacatgtgcgaatgatgcccatacttgagccacctaactttgttttagggcgactgccctgctgcgtaacatcgttgctgctgcgtaacatcgttgctgctccataacatcaaacatcgacccacggcgtaacgcgcttgctgcttggatgcccgaggcatagactgtacaaaaaaacagtcataacaagccatgaaaaccgccactgcgccgttaccaccgctgcgttcggtcaaggttctggaccagttgcgtgagcgcatacgctacttgcattacagtttacgaaccgaacaggcttatgtcaactgggtttgtgccttcatccgtttccacggtgtgcgtcacccggcaaccttgggcagcagcgaagtcgaggcatttctgtcctggctggcgaacgagcgcaaggtttcggtctccacgcatcgtcaggcattggcggccttgctgttcttctacggcaaggtgctgtgcacggatctgcccttgcttcaggagatcggtagacctcggccgtcgcggcgcttgccggtggtgctgaccccggatgaagtggttcgcatcctcggttttctggaaggcgagcatcgtttgttcgcccaggactctagctatagttctagtggttggctacagctttgtttgtactatcaacaggttgaactgctgatcaacagatcctctacgcggccgcggtaccataacttcgtatagcatacattatacgaagttatctggtttaaacgtacccgtagtggctatggcagggcttgccgccccgacgttggctgcgagccctgggccttcacccgaacttgggggttggggtggggaaaaggaagaaacgcgggcgtattggtcccaatggggtctcggtggggtatcgacagagtgccagccctgggaccgaaccccgcgtttatgaacaaacgacccaacacccgtgcgttttattctgtctttttattgccgtcatagcgcgggttccttccggtattgtctccttccgtgtttcagttagcctcccccatctcccggtaccgcatgctatgcatcagctgctagcttagcgagcgtccacagcctggggaccgtaacgggagtgagcgggcaggttcacacgggtctgcttcagctcagggggcaggccagcgtagtacttgtccaggtgacgcagcaggggggggtccagctggtgacgcaggcagaattccttcacagcgttgtacaggccgtagaacagggtgataccctcgggagcagcagcggtggacacgggcagacgcacagcacggttggtacgggtagcctcgttacggatagccaccaccacgttgaacagggaggggggcaccagctcgaaacccagcacgtgttcggtgaagatggaacgaccgtaggacagacgagtcaggtcgtaaccacggcacaggtcgtccacgcaagtgtacacagcgggggaaccgtcgccgcactcggagtaaccgcgcatcacggtcatccaacggggagcggtgtcggaggacagcagggtcagcagagcacgcagctggtcggggttgttgtacagcagggccagggtgtccaggaaagcgtcgtccagcagcacggagttagcagcctcgggggtcacgggacggtaacggatcagctgggacaggggaccgtccctacgggtcacgttgaccaggggacgcagccaggactcgtacttgtcgccctggaacacctctcccagcaggcaacgacgggtcagctcggggcactcagcgggcaccttctcagccacggtgggagccacggacacggtagcggaggacacgatgggcagcagcaggcagcaccacagcagagccacgggaccgggggagaaggagaaaccgcagtcgggacgacggcacatggtggctcgagatcccgggtgatcaagtcttcgtcgagtgattgtaaataaaatgtaatttacagtatagtattttaattaatatacaaatgatttgataataattcttatttaactataatatattgtgttgggttgaattaaaggtccgtatactagtatcgattcgcgacctactccggaatattaatagatcatggagataattaaaatgataaccatctcgcaaataaataagtattttactgttttcgtaacagttttgtaataaaaaaacctataaatattccggattattcataccgtcccaccatcgggcgcggatccgccaccatgtcccccaagaacctgacccccttcctgaccgctctgtggctgctgctgggccactcccgtgtgcctcgtgtgcgtgctgaggaatgctgcgagttcatcaacgtgaaccacccccccgagcgctgctacgacttcaagatgtgcaaccgtttcaccgtggctctgcgttgccccgacggcgaagtgtgctactcccccgaaaagaccgctgagatccgtggtatcgtgaccaccatgacccactccctgacccgtcaggtggtgcacaacaagctgacctcttgcaactacaaccccctgtacctcgaggctgacggtcgtatccgttgcggcaaggtcaacgacaaggctcagtacctgctgggtgctgctggttccgtgccctaccgttggatcaacctcgagtacgacaagatcacccgtatcgtgggcctggaccagtacctcgagtccgtgaagaagcacaagcgtctggacgtgtgccgtgctaagatgggttacatgctgcagtaaaagcttgtcgagaagtactagaggatcataatcagccataccacatttgtagaggttttacttgctttaaaaaacctcccacacctccccctgaacctgaaacataaaatgaatgcaattgttgttgttaacttgtttattgcagcttataatggttacaaataaagcaatagcatcacaaatttcacaaataaagcatttttttcactgcattctagttgtggtttgtccaaactcatcaatgtatcttatcatgtctggatctgatcactgcttgagcctagaagatccggctgctaacaaagcccgaaaggaagctgagttggctgctgtggctagctttgtttaactttaagaaggagatacatctagaccggaatattaatagatcatggagataattaaaatgataaccatctcgcaaataaataagtattttactgttttcgtaacagttttgtaataaaaaaacctataaatattccggattattcataccgtcccaccatcgggcgcggatccgccaccatgctgcgtctgctgctgcgtcaccacttccactgcctgctgctgtgcgctgtgtgggctaccccctgcctggcttccccttggtccaccctgaccgctaaccagaacccctccccaccctggtccaagctgacctactccaagccccacgacgctgctaccttctactgccccttcctgtacccatccccccctcgttccccactgcagttctccggtttccagcgtgtgctgaccggtcccgagtgccgtaacgagactctgtacctgctgtacaaccgcgagggccagaccctggtcgagaggtcctccacctgggtcaagaaggtcatctggtacttgtccggtcgtaaccagaccatcctgcagcgtatgccccgtaccgcttccaagccctccgacggcaacgtgcagatctccgtcgaggacgctaagatcttcggtgctcacatggtgcccaagcagaccaagctgctgcgtttcgtggtcaacgacggcacccgttaccagatgtgcgtgatgaagctcgagtcctgggctcacgtgttccgtgactactccgtgtccttccaagtgcgcctgaccttcaccgaggctaacaaccagacctacaccttctgcacccaccccaacctgatcgtgtaaaagcttgtcgagaagtactagaggatcataatcagccataccacatttgtagaggttttacttgctttaaaaaacctcccacacctccccctgaacctgaaacataaaatgaatgcaattgttgttgttaacttgtttattgcagcttataatggttacaaataaagcaatagcatcacaaatttcacaaataaagcatttttttcactgcattctagttgtggtttgtccaaactcatcaatgtatcttatcatgtctggatctgatcactgcttgagcctagaagatccggctgctaacaaagcccgaaaggaagctgagttggctgctgggtgcctaatgagtgagctaactcacattaattgcccggaatattaatagatcatggagataattaaaatgataaccatctcgcaaataaataagtattttactgttttcgtaacagttttgtaataaaaaaacctataaatattccggattattcataccgtcccaccatcgggcgcggatccgccaccatgcgtctgtgccgtgtgtggctgtccgtgtgcctgtgcgctgtggtgctgggccagtgccagcgtgaaaccgctgagaagaacgactactaccgtgtgccccactactgggacgcttgctcccgtgctctgcccgaccagacccgttacaagtacgtcgagcagctggtggacctgaccctgaactaccactacgacgcttcccacggcctggacaacttcgacgtgctgaagcgtatcaacgtgaccgaggtgtccctgctgatctccgacttccgtcgtcagaaccgtcgtggtggcaccaacaagcgtaccaccttcaacgctgctggttccctggctccccacgctcgttccctcgagttctccgtgcgtctgttcgctaactaaaagcttgtcgagaagtactagaggatcataatcagccataccacatttgtagaggttttacttgctttaaaaaacctcccacacctccccctgaacctgaaacataaaatgaatgcaattgttgttgttaacttgtttattgcagcttataatggttacaaataaagcaatagcatcacaaatttcacaaataaagcatttttttcactgcattctagttgtggtttgtccaaactcatcaatgtatcttatcatgtctggatctgatcactgcttgagcctagaagatccggctgctaacaaagcccgaaaggaagctgagttggctgctgccaccgctgagcaataactatcataacccccggaatattaatagatcatggagataattaaaatgataaccatctcgcaaataaataagtattttactgttttcgtaacagttttgtaataaaaaaacctataaatattccggattattcataccgtcccaccatcgggcgcggatcccggtccgaagcgcgcggaattcaaaggcctaccgtcgacgccaccatggaatcccgtatctggtgcctggtcgtgtgcgtgaacctgtgcatcgtgtgcctgggtgctgctgtgtcctcctcctccacccgtggcacctccgctacccactcccaccactcctcccacaccacctccgccgctcactcccgttccggttccgtgtcccagcgtgtgacctcctcccagaccgtgtcccacggtgtcaacgagactatctacaacaccaccctgaagtacggcgacgtcgtgggtgtcaacaccaccaagtacccctaccgtgtgtgctccatggctcagggcaccgacctgatccgtttcgagcgtaacatcgtgtgcacctccatgaagcccatcaacgaggacctggacgagggtatcatggtggtgtacaagcgcaacatcgtggctcacaccttcaaggtccgcgtgtaccagaaggtgctgaccttccgtcgttcctacgcttacatccacaccacttacctgctgggttccaacaccgagtacgtggcccctcccatgtgggagatccaccacatcaactcccactcccagtgctactcctcttactcccgtgtgatcgctggcaccgtgttcgtggcttaccaccgtgactcctacgagaacaagaccatgcagctgatgcccgacgactactccaacacccactccacccgttacgtgaccgtgaaggaccagtggcactcccgtggttccacctggctgtaccgtgaaacctgcaacctgaactgcatggtcaccatcaccaccgctcgttccaagtacccttaccacttcttcgctacctccaccggcgacgtggtggacatctcccccttctacaacggtactaaccgtaacgcttcctacttcggcgagaacgctgacaagttcttcatcttccccaactacaccatcgtgtccgacttcggtcgtcccaactccgctctggaaacccaccgtctggtggctttcttggagcgtgctgactccgtgatctcctgggacatccaggacgagaagaacgtgacctgccagctgaccttctgggaggcttccgagcgtaccatccgttccgaggctgaggactcctaccacttctccagcgctaagatgaccgctaccttcctgtccaagaaacaagaggtcaacatgtccgactccgccctggactgcgtgcgtgacgaggctatcaacaagctgcagcagatcttcaacacctcctacaaccagacctacgagaagtacggaaacgtgtccgtgttcgagactaccggtggcctggtggtgttctggcagggtatcaagcagaagtccctggtcgagctggaacgtctggctaaccgttcctccctgaacctgacccacaaccgtaccaagcgttccaccgacggcaacaacgctactcacctgtccaacatggaatccgtgcacaacctggtgtacgctcagctgcagttcacctacgacaccctgcgcggttacatcaaccgtgctctggctcagatcgctgaggcttggtgcgtggaccagcgtcgtaccctggaagtgttcaaggaactgtccaagatcaacccctccgctatcctgtccgccatctacaacaagcctatcgctgctcgtttcatgggcgacgtgctgggcctggcttcctgcgtgaccatcaaccagacttccgtgaaggtgctgcgtgacatgaacgtgaaggaatcccccggtcgttgctactcccgtcccgtggtcatcttcaacttcgctaactcctcctacgtgcagtacggccagctgggcgaggacaacgagatcctgctgggcaaccaccgtaccgaggaatgccagctgccctccctgaagatcttcatcgctggcaactccgcttacgaatacgtggactacctgttcaagcgcatgatcgacctgtcctccatctctaccgtggactccatgatcgctctggacatcgaccccctggaaaacaccgacttccgtgtgctggaactgtactcccagaaggaactgcgttccatcaacgtgttcgacctggaagagatcatgcgcgagttcaactcctacaagcagcgtgttaagtacgtcgaggacaaggtggtggaccccctgcccccctacctgaagggactggacgacctgatgtccggcctgggagctgccggcaaggctgtgggtgtcgctatcggtgctgtgggtggtgctgtggcttccgtggtcgagggtgtcgccaccttcctgaagaaccccttcggtgctttcaccatcatcctggtggctatcgctgtggtcatcatcatctacctgatctacacccgtcagcgtcgtctgtgcatgcagcccctgcagaacctgttcccctacctggtgtccgctgacggtactaccgtgacctccggcaacaccaaggacacctccctgcaggctcccccatcctacgaggaatccgtctacaactccggtcgcaagggtcccggtcccccttcctccgacgcttctaccgctgctcccccatacaccaacgagcaggcttaccagatgctgctggctctcgtgcgtctggacgctgagcagcgtgcacagcagaacggcaccgactccctggacggccagaccggaacccaggacaagggccagaagcccaacctgctggaccgtctgcgtcaccgcaagaacggttaccgtcacctgaaggactccgacgaggaagagaacgtctaaggcgcgccaagcttgtcgagaagtactagagatcataatcagccataccacatttgtagaggttttacttgctttaaaaaacctcccacacctccccctgaacctgaaacataaaatgaatgcaattgttgttgttaacttgtttattgcagcttataatggttacaaataaagcaatagcatcacaaatttcacaaataaagcatttttttcactgcattctagttgtggtttgtccaaactcatcaatgtatcttatcatgtctggatctgatcactgcttgagcctagaagatccggctgctaacaaagcccgaaaggaagctgagttggctgctgccaccgctgagcaataactatcataacccctaggagatccgaaccagataagtgaaatctagttccaaactattttgtcatttttaattttcgtattagcttacgacgctacacccagttcccatctattttgtcactcttccctaaataatccttaaaaactccatttccacccctcccagttcccaactattttgtccgcccaca

SEQ ID NO: 18 - DNA, 12658 bp, Artificial Sequence
  Synthetic construct
ttgttccagtttggaacaagagtccactattaaagaacgtggactccaacgtcaaagggcgaaaaaccgtctatcagggcgatggcccactacgtgaaccatcaccctaatcaagttttttggggtcgaggtgccgtaaagcactaaatcggaaccctaaagggagcccccgatttagagcttgacggggaaagccggcgaacgtggcgagaaaggaagggaagaaagcgaaaggagcgggcgctagggcgctggcaagtgtagcggtcacgctgcgcgtaaccaccacacccgccgcgcttaatgcgccgctacagggcgcgtccattcgccattcaggctgcgcaactgttgggaagggcgatcggtgcgggcctcttcgctattacgccagctggcgaaagggggatgtgctgcaaggcgattaagttgggtaacgccagggttttcccagtcacgacgttgtaaaacgacggccagtgcatagaccagccgcgtaacctggcaaaatcggttacggttgagtaataaatggatgccctgcgtaagcgggtgtgggcggacaataaagtcttaaactgaacaaaatagatctaaactatgacaataaagtcttaaactagacagaatagttgtaaactgaaatcagtccagttatgctgtgaaaaagcatactggacttttgttatggctaaagcaaactcttcattttctgaagtgcaaattgcccgtcgtattaaagaggggcgtggccaagggcatggtaaagactatattcgcggcgttgtgacaatttaccgaacaactccgcggccgggaagccgatctcggcttgaacgaattgttaggtggcggtacttgggtcgatatcaaagtgcatcacttcttcccgtatgcccaactttgtatagagagccactgcgggatcgtcaccgtaatctgcttgcacgtagatcacataagcaccaagcgcgttggcctcatgcttgaggagattgatgagcgcggtggcaatgccctgcctccggtgctcgccggagactgcgagatcatagatatagatctcactacgcggctgctcaaacttgggcagaacgtaagccgcgagagcgccaacaaccgcttcttggtcgaaggcagcaagcgcgatgaatgtcttactacggagcaagttcccgaggtaatcggagtccggctgatgttgggagtaggtggctacgtctccgaactcacgaccgaaaagatcaagagcagcccgcatggatttgacttggtcagggccgagcctacatgtgcgaatgatgcccatacttgagccacctaactttgttttagggcgactgccctgctgcgtaacatcgttgctgctgcgtaacatcgttgctgctccataacatcaaacatcgacccacggcgtaacgcgcttgctgcttggatgcccgaggcatagactgtacaaaaaaacagtcataacaagccatgaaaaccgccactgcgccgttaccaccgctgcgttcggtcaaggttctggaccagttgcgtgagcgcatacgctacttgcattacagtttacgaaccgaacaggcttatgtcaactgggtttgtgccttcatccgtttccacggtgtgcgtcacccggcaaccttgggcagcagcgaagtcgaggcatttctgtcctggctggcgaacgagcgcaaggtttcggtctccacgcatcgtcaggcattggcggccttgctgttcttctacggcaaggtgctgtgcacggatctgcccttgcttcaggagatcggtagacctcggccgtcgcggcgcttgccggtggtgctgaccccggatgaagtggttcgcatcctcggttttctggaaggcgagcatcgtttgttcgcccaggactctagctatagttctagtggttggctacagctttgtttgtactatcaacaggttgaactgctgatcaacagatcctctacgcggccgcggtaccataacttcgtatagcatacattatacgaagttatctggtttaaacgtacccgtagtggctatggcagggcttgccgccccgacgttggctgcgagccctgggccttcacccgaacttgggggttggggtggggaaaaggaagaaacgcgggcgtattggtcccaatggggtctcggtggggtatcgacagagtgccagccctgggaccgaaccccgcgtttatgaacaaacgacccaacacccgtgcgttttattctgtctttttattgccgtcatagcgcgggttccttccggtattgtctccttccgtgtttcagttagcctcccccatctcccggtaccgcatgctatgcatcagctgctagcttagcgagcgtccacagcctggggaccgtaacgggagtgagcgggcaggttcacacgggtctgcttcagctcagggggcaggccagcgtagtacttgtccaggtgacgcagcaggggggggtccagctggtgacgcaggcagaattccttcacagcgttgtacaggccgtagaacagggtgataccctcgggagcagcagcggtggacacgggcagacgcacagcacggttggtacgggtagcctcgttacggatagccaccaccacgttgaacagggaggggggcaccagctcgaaacccagcacgtgttcggtgaagatggaacgaccgtaggacagacgagtcaggtcgtaaccacggcacaggtcgtccacgcaagtgtacacagcgggggaaccgtcgccgcactcggagtaaccgcgcatcacggtcatccaacggggagcggtgtcggaggacagcagggtcagcagagcacgcagctggtcggggttgttgtacagcagggccagggtgtccaggaaagcgtcgtccagcagcacggagttagcagcctcgggggtcacgggacggtaacggatcagctgggacaggggaccgtccctacgggtcacgttgaccaggggacgcagccaggactcgtacttgtcgccctggaacacctctcccagcaggcaacgacgggtcagctcggggcactcagcgggcaccttctcagccacggtgggagccacggacacggtagcggaggacacgatgggcagcagcaggcagcaccacagcagagccacgggaccgggggagaaggagaaaccgcagtcgggacgacggcacatggtggctcgagatcccgggtgatcaagtcttcgtcgagtgattgtaaataaaatgtaatttacagtatagtattttaattaatatacaaatgatttgataataattcttatttaactataatatattgtgttgggttgaattaaaggtccgtatactagtatcgattcgcgacctactccggaatattaatagatcatggagataattaaaatgataaccatctcgcaaataaataagtattttactgttttcgtaacagttttgtaataaaaaaacctataaatattccggattattcataccgtcccaccatcgggcgcggatccgccaccatgtcccccaagaacctgacccccttcctgaccgctctgtggctgctgctgggccactcccgtgtgcctcgtgtgcgtgctgaggaatgctgcgagttcatcaacgtgaaccacccccccgagcgctgctacgacttcaagatgtgcaaccgtttcaccgtggctctgcgttgccccgacggcgaagtgtgctactcccccgaaaagaccgctgagatccgtggtatcgtgaccaccatgacccactccctgacccgtcaggtggtgcacaacaagctgacctcttgcaactacaaccccctgtacctcgaggctgacggtcgtatccgttgcggcaaggtcaacgacaaggctcagtacctgctgggtgctgctggttccgtgccctaccgttggatcaacctcgagtacgacaagatcacccgtatcgtgggcctggaccagtacctcgagtccgtgaagaagcacaagcgtctggacgtgtgccgtgctaagatgggttacatgctgcagtaaaagcttgtcgagaagtactagaggatcataatcagccataccacatttgtagaggttttacttgctttaaaaaacctcccacacctccccctgaacctgaaacataaaatgaatgcaattgttgttgttaacttgtttattgcagcttataatggttacaaataaagcaatagcatcacaaatttcacaaataaagcatttttttcactgcattctagttgtggtttgtccaaactcatcaatgtatcttatcatgtctggatctgatcactgcttgagcctagaagatccggctgctaacaaagcccgaaaggaagctgagttggctgctgtggctagctttgtttaactttaagaaggagatacatctagaccggaatattaatagatcatggagataattaaaatgataaccatctcgcaaataaataagtattttactgttttcgtaacagttttgtaataaaaaaacctataaatattccggattattcataccgtcccaccatcgggcgcggatccgccaccatgctgcgtctgctgctgcgtcaccacttccactgcctgctgctgtgcgctgtgtgggctaccccctgcctggcttccccttggtccaccctgaccgctaaccagaacccctccccaccctggtccaagctgacctactccaagccccacgacgctgctaccttctactgccccttcctgtacccatccccccctcgttccccactgcagttctccggtttccagcgtgtgctgaccggtcccgagtgccgtaacgagactctgtacctgctgtacaaccgcgagggccagaccctggtcgagaggtcctccacctgggtcaagaaggtcatctggtacttgtccggtcgtaaccagaccatcctgcagcgtatgccccgtaccgcttccaagccctccgacggcaacgtgcagatctccgtcgaggacgctaagatcttcggtgctcacatggtgcccaagcagaccaagctgctgcgtttcgtggtcaacgacggcacccgttaccagatgtgcgtgatgaagctcgagtcctgggctcacgtgttccgtgactactccgtgtccttccaagtgcgcctgaccttcaccgaggctaacaaccagacctacaccttctgcacccaccccaacctgatcgtgtaaaagcttgtcgagaagtactagaggatcataatcagccataccacatttgtagaggttttacttgctttaaaaaacctcccacacctccccctgaacctgaaacataaaatgaatgcaattgttgttgttaacttgtttattgcagcttataatggttacaaataaagcaatagcatcacaaatttcacaaataaagcatttttttcactgcattctagttgtggtttgtccaaactcatcaatgtatcttatcatgtctggatctgatcactgcttgagcctagaagatccggctgctaacaaagcccgaaaggaagctgagttggctgctgggtgcctaatgagtgagctaactcacattaattgcccggaatattaatagatcatggagataattaaaatgataaccatctcgcaaataaataagtattttactgttttcgtaacagttttgtaataaaaaaacctataaatattccggattattcataccgtcccaccatcgggcgcggatccgccaccatgcgtctgtgccgtgtgtggctgtccgtgtgcctgtgcgctgtggtgctgggccagtgccagcgtgaaaccgctgagaagaacgactactaccgtgtgccccactactgggacgcttgctcccgtgctctgcccgaccagacccgttacaagtacgtcgagcagctggtggacctgaccctgaactaccactacgacgcttcccacggcctggacaacttcgacgtgctgaagcgtatcaacgtgaccgaggtgtccctgctgatctccgacttccgtcgtcagaaccgtcgtggtggcaccaacaagcgtaccaccttcaacgctgctggttccctggctccccacgctcgttccctcgagttctccgtgcgtctgttcgctaactaaaagcttgtcgagaagtactagaggatcataatcagccataccacatttgtagaggttttacttgctttaaaaaacctcccacacctccccctgaacctgaaacataaaatgaatgcaattgttgttgttaacttgtttattgcagcttataatggttacaaataaagcaatagcatcacaaatttcacaaataaagcatttttttcactgcattctagttgtggtttgtccaaactcatcaatgtatcttatcatgtctggatctgatcactgcttgagcctagaagatccggctgctaacaaagcccgaaaggaagctgagttggctgctgccaccgctgagcaataactatcataacccccggaatattaatagatcatggagataattaaaatgataaccatctcgcaaataaataagtattttactgttttcgtaacagttttgtaataaaaaaacctataaatattccggattattcataccgtcccaccatcgggcgcggatcccggtccgaagcgcgcggaattcaaaggcctaccgtcgacgccaccatggaatcccgtatctggtgcctggtcgtgtgcgtgaacctgtgcatcgtgtgcctgggtgctgctgtgtcctcctcctccacccgtggcacctccgctacccactcccaccactcctcccacaccacctccgccgctcactcccgttccggttccgtgtcccagcgtgtgacctcctcccagaccgtgtcccacggtgtcaacgagactatctacaacaccaccctgaagtacggcgacgtcgtgggtgtcaacaccaccaagtacccctaccgtgtgtgctccatggctcagggcaccgacctgatccgtttcgagcgtaacatcgtgtgcacctccatgaagcccatcaacgaggacctggacgagggtatcatggtggtgtacaagcgcaacatcgtggctcacaccttcaaggtccgcgtgtaccagaaggtgctgaccttccgtcgttcctacgcttacatccacaccacttacctgctgggttccaacaccgagtacgtggcccctcccatgtgggagatccaccacatcaactcccactcccagtgctactcctcttactcccgtgtgatcgctggcaccgtgttcgtggcttaccaccgtgactcctacgagaacaagaccatgcagctgatgcccgacgactactccaacacccactccacccgttacgtgaccgtgaaggaccagtggcactcccgtggttccacctggctgtaccgtgaaacctgcaacctgaactgcatggtcaccatcaccaccgctcgttccaagtacccttaccacttcttcgctacctccaccggcgacgtggtggacatctcccccttctacaacggtactaaccgtaacgcttcctacttcggcgagaacgctgacaagttcttcatcttccccaactacaccatcgtgtccgacttcggtcgtcccaactccgctctggaaacccaccgtctggtggctttcttggagcgtgctgactccgtgatctcctgggacatccaggacgagaagaacgtgacctgccagctgaccttctgggaggcttccgagcgtaccatccgttccgaggctgaggactcctaccacttctccagcgctaagatgaccgctaccttcctgtccaagaaacaagaggtcaacatgtccgactccgccctggactgcgtgcgtgacgaggctatcaacaagctgcagcagatcttcaacacctcctacaaccagacctacgagaagtacggaaacgtgtccgtgttcgagactaccggtggcctggtggtgttctggcagggtatcaagcagaagtccctggtcgagctggaacgtctggctaaccgttcctccctgaacctgacccacaaccgtaccaagcgttccaccgacggcaacaacgctactcacctgtccaacatggaatccgtgcacaacctggtgtacgctcagctgcagttcacctacgacaccctgcgcggttacatcaaccgtgctctggctcagatcgctgaggcttggtgcgtggaccagcgtcgtaccctggaagtgttcaaggaactgtccaagatcaacccctccgctatcctgtccgccatctacaacaagcctatcgctgctcgtttcatgggcgacgtgctgggcctggcttcctgcgtgaccatcaaccagacttccgtgaaggtgctgcgtgacatgaacgtgaaggaatcccccggtcgttgctactcccgtcccgtggtcatcttcaacttcgctaactcctcctacgtgcagtacggccagctgggcgaggacaacgagatcctgctgggcaaccaccgtaccgaggaatgccagctgccctccctgaagatcttcatcgctggcaactccgcttacgaatacgtggactacctgttcaagcgcatgatcgacctgtcctccatctctaccgtggactccatgatcgctctggacatcgaccccctggaaaacaccgacttccgtgtgctggaactgtactcccagaaggaactgcgttccatcaacgtgttcgacctggaagagatcatgcgcgagttcaactcctacaagcagcgtgttaagtacgtcgaggacaaggtggtggaccccctgcccccctacctgaagggactggacgacctgatgtccggcctgggagctgccggcaaggctgtgggtgtcgctatcggtgctgtgggtggtgctgtggcttccgtggtcgagggtgtcgccaccttcctgaagaaccccttcggtgctttcaccatcatcctggtggctatcgctgtggtcatcatcatctacctgatctacacccgtcagcgtcgtctgtgcatgcagcccctgcagaacctgttcccctacctggtgtccgctgacggtactaccgtgacctccggcaacaccaaggacacctccctgcaggctcccccatcctacgaggaatccgtctacaactccggtcgcaagggtcccggtcccccttcctccgacgcttctaccgctgctcccccatacaccaacgagcaggcttaccagatgctgctggctctcgtgcgtctggacgctgagcagcgtgcacagcagaacggcaccgactccctggacggccagaccggaacccaggacaagggccagaagcccaacctgctggaccgtctgcgtcaccgcaagaacggttaccgtcacctgaaggactccgacgaggaagagaacgtctaaggcgcgccaagcttgtcgagaagtactagagatcataatcagccataccacatttgtagaggttttacttgctttaaaaaacctcccacacctccccctgaacctgaaacataaaatgaatgcaattgttgttgttaacttgtttattgcagcttataatggttacaaataaagcaatagcatcacaaatttcacaaataaagcatttttttcactgcattctagttgtggtttgtccaaactcatcaatgtatcttatcatgtctggatctgatcactgcttgagcctagaagatccggctgctaacaaagcccgaaaggaagctgggaatattaatagatcatggagataattaaaatgataaccatctcgcaaataaataagtattttactgttttcgtaacagttttgtaataaaaaaacctataaatattccggattattcataccgtcccaccatcgggcgcggatccgccaccatgcgtcccggcctgccctcctacctgatcgtgctggctgtgtgcctgctgtcccacctcctgtcctcccgttacggtgctgaggctatctccgagcccctggacaaggctttccacctcctgctgaacacctacggtcgtcctatccgtttcctgcgcgagaacaccacccagtgcacctacaactcctccctgcgcaactccaccgtcgtccgcgagaacgctatctccttcaacttcttccagtcctacaaccagtactacgtgttccacatgccccgttgcctgttcgctggtcccctggctgagcagttcctgaaccaggtggacctgaccgagactctcgagcgttaccagcagcgtctgaacacttacgctctggtgtccaaggacctggcttcctaccgttccttcagccagcagctgaaggctcaggactccctgggcgagcagcccaccactgtgcctccccctatcgacctgtccatcccccacgtgtggatgcccccccagaccactcctcacggctggaccgagtcccacaccacctccggactgcaccgtccccacttcaaccagacctgcatcctgttcgacggtcacgacctgctgttctccaccgtgaccccctgcctgcaccagggcttctacctcatcgacgagctgcgttacgtgaagatcaccctgaccgaggatttcttcgtggtcaccgtgtccatcgacgacgacacccccatgctgctgatcttcggtcacctcccccgtgtgctgttcaaggctccctaccagcgtgacaacttcatcctgcgtcagaccgagaagcacgagctgctggtgctggtcaagaaggaccagctgaaccgtcactcttacctgaaggaccccgacttcctggacgctgctctggacttcaactacctggacctgtccgctctgctgaggaactccttccaccgttacgctgtggacgtgctgaagtccggtcgttgccagatgctggaccgtcgtaccgtcgagatggctttcgcttacgccctggctctgttcgctgctgctcgtcaagaagaggctggcgctcaggtgtccgtgccccgtgctctggaccgtcaggctgctctgctgcagatccaagagttcatgatcacttgcctgtcccagaccccccctcgtaccaccctgctgctgtaccccaccgctgtggacctggctaagcgtgctctgtggacccccaaccagatcaccgacatcacctccctcgtgcgtctggtgtacatcctgtccaagcagaaccagcagcacctgatcccccagtgggctctgcgtcagatcgctgacttcgctctgaagctgcacaagacccacctggcttcattcctcagcgctttcgctcgccaagagctgtacctgatgggttccctggtgcactccatgctggtgcacaccaccgagcgtcgcgagatcttcatcgtggaaaccggcctgtgctccctggccgagctgtcccacttcacccagctgctggctcacccccaccacgagtacctgtccgacctgtacaccccctgctcctcttccggtcgtcgtgaccactccctggaacgtctgacccgtctgttccccgacgctaccgtgcctaccaccgtgcctgctgctctgtccatcctgtctaccatgcagccctccaccctggaaaccttccccgacctgttctgcctgcctctgggcgagtccttctccgctctgaccgtgtccgagcacgtgtcctacgtggtcaccaaccagtacctgatcaagggcatctcctaccccgtgtccaccaccgtcgtgggccagtccctgatcatcacccagaccgactcccagaccaagtgcgagctgacccgtaacatgcacaccactcactccatcaccgctgctctgaacatctccctcgagaactgcgctttctgccagtccgctctgttggagtacgacgacactcagggtgtcatcaacatcatgtacatgcacgactccgacgacgtgctgttcgctctggacccctacaacgaggtggtggtgtcctccccccgtacccactacctgatgctgctgaagaacggcaccgtgctggaagtgaccgacgtggtggtggacgctaccgaccgtctgctgatgatgtccgtgtacgctctgtccgctatcatcggcatctacctgctgtaccgtatgctgaagacctgctaaggcgccaagctttgtcgagaagtactagaggatcataatcagccataccacatttgtagaggttttacttgctttaaaaaacctcccacacctccccctgaacctgaaacataaaatgaatgcaattgttgttgttaacttgtttattgcagcttataatggttacaaataaagcaatagcatcacaaatttcacaaataaagcatttttttcactgcattctagttgtggtttgtccaaactcatcaatgtatcttatcatgtctggatctgatcactgcttgagcctagaagatccggctgctaacaaagcccgaaaggaagctgagttggctgctgccaccgctgagcaataactatcataacccctaggagatccgaaccagataagtgaaatctagttccaaactattttgtcatttttaattttcgtattagcttacgacgctacacccagttcccatctattttgtcactcttccctaaataatccttaaaaactccatttccacccctcccagttcccaactattttgtccgcccaca

SEQ ID NO: 19 - DNA, 14914 bp, Artificial Sequence
  Synthetic construct
ttgttccagtttggaacaagagtccactattaaagaacgtggactccaacgtcaaagggcgaaaaaccgtctatcagggcgatggcccactacgtgaaccatcaccctaatcaagttttttggggtcgaggtgccgtaaagcactaaatcggaaccctaaagggagcccccgatttagagcttgacggggaaagccggcgaacgtggcgagaaaggaagggaagaaagcgaaaggagcgggcgctagggcgctggcaagtgtagcggtcacgctgcgcgtaaccaccacacccgccgcgcttaatgcgccgctacagggcgcgtccattcgccattcaggctgcgcaactgttgggaagggcgatcggtgcgggcctcttcgctattacgccagctggcgaaagggggatgtgctgcaaggcgattaagttgggtaacgccagggttttcccagtcacgacgttgtaaaacgacggccagtgcatagaccagccgcgtaacctggcaaaatcggttacggttgagtaataaatggatgccctgcgtaagcgggtgtgggcggacaataaagtcttaaactgaacaaaatagatctaaactatgacaataaagtcttaaactagacagaatagttgtaaactgaaatcagtccagttatgctgtgaaaaagcatactggacttttgttatggctaaagcaaactcttcattttctgaagtgcaaattgcccgtcgtattaaagaggggcgtggccaagggcatggtaaagactatattcgcggcgttgtgacaatttaccgaacaactccgcggccgggaagccgatctcggcttgaacgaattgttaggtggcggtacttgggtcgatatcaaagtgcatcacttcttcccgtatgcccaactttgtatagagagccactgcgggatcgtcaccgtaatctgcttgcacgtagatcacataagcaccaagcgcgttggcctcatgcttgaggagattgatgagcgcggtggcaatgccctgcctccggtgctcgccggagactgcgagatcatagatatagatctcactacgcggctgctcaaacttgggcagaacgtaagccgcgagagcgccaacaaccgcttcttggtcgaaggcagcaagcgcgatgaatgtcttactacggagcaagttcccgaggtaatcggagtccggctgatgttgggagtaggtggctacgtctccgaactcacgaccgaaaagatcaagagcagcccgcatggatttgacttggtcagggccgagcctacatgtgcgaatgatgcccatacttgagccacctaactttgttttagggcgactgccctgctgcgtaacatcgttgctgctgcgtaacatcgttgctgctccataacatcaaacatcgacccacggcgtaacgcgcttgctgcttggatgcccgaggcatagactgtacaaaaaaacagtcataacaagccatgaaaaccgccactgcgccgttaccaccgctgcgttcggtcaaggttctggaccagttgcgtgagcgcatacgctacttgcattacagtttacgaaccgaacaggcttatgtcaactgggtttgtgccttcatccgtttccacggtgtgcgtcacccggcaaccttgggcagcagcgaagtcgaggcatttctgtcctggctggcgaacgagcgcaaggtttcggtctccacgcatcgtcaggcattggcggccttgctgttcttctacggcaaggtgctgtgcacggatctgcccttgcttcaggagatcggtagacctcggccgtcgcggcgcttgccggtggtgctgaccccggatgaagtggttcgcatcctcggttttctggaaggcgagcatcgtttgttcgcccaggactctagctatagttctagtggttggctacagctttgtttgtactatcaacaggttgaactgctgatcaacagatcctctacgcggccgcggtaccataacttcgtatagcatacattatacgaagttatctggtttaaacgtacccgtagtggctatggcagggcttgccgccccgacgttggctgcgagccctgggccttcacccgaacttgggggttggggtggggaaaaggaagaaacgcgggcgtattggtcccaatggggtctcggtggggtatcgacagagtgccagccctgggaccgaaccccgcgtttatgaacaaacgacccaacacccgtgcgttttattctgtctttttattgccgtcatagcgcgggttccttccggtattgtctccttccgtgtttcagttagcctcccccatctcccggtaccgcatgctatgcatcagctgctagcttagcgagcgtccacagcctggggaccgtaacgggagtgagcgggcaggttcacacgggtctgcttcagctcagggggcaggccagcgtagtacttgtccaggtgacgcagcaggggggggtccagctggtgacgcaggcagaattccttcacagcgttgtacaggccgtagaacagggtgataccctcgggagcagcagcggtggacacgggcagacgcacagcacggttggtacgggtagcctcgttacggatagccaccaccacgttgaacagggaggggggcaccagctcgaaacccagcacgtgttcggtgaagatggaacgaccgtaggacagacgagtcaggtcgtaaccacggcacaggtcgtccacgcaagtgtacacagcgggggaaccgtcgccgcactcggagtaaccgcgcatcacggtcatccaacggggagcggtgtcggaggacagcagggtcagcagagcacgcagctggtcggggttgttgtacagcagggccagggtgtccaggaaagcgtcgtccagcagcacggagttagcagcctcgggggtcacgggacggtaacggatcagctgggacaggggaccgtccctacgggtcacgttgaccaggggacgcagccaggactcgtacttgtcgccctggaacacctctcccagcaggcaacgacgggtcagctcggggcactcagcgggcaccttctcagccacggtgggagccacggacacggtagcggaggacacgatgggcagcagcaggcagcaccacagcagagccacgggaccgggggagaaggagaaaccgcagtcgggacgacggcacatggtggctcgagatcccgggtgatcaagtcttcgtcgagtgattgtaaataaaatgtaatttacagtatagtattttaattaatatacaaatgatttgataataattcttatttaactataatatattgtgttgggttgaattaaaggtccgtatactagtatcgattcgcgacctactccggaatattaatagatcatggagataattaaaatgataaccatctcgcaaataaataagtattttactgttttcgtaacagttttgtaataaaaaaacctataaatattccggattattcataccgtcccaccatcgggcgcggatccgccaccatgtcccccaagaacctgacccccttcctgaccgctctgtggctgctgctgggccactcccgtgtgcctcgtgtgcgtgctgaggaatgctgcgagttcatcaacgtgaaccacccccccgagcgctgctacgacttcaagatgtgcaaccgtttcaccgtggctctgcgttgccccgacggcgaagtgtgctactcccccgaaaagaccgctgagatccgtggtatcgtgaccaccatgacccactccctgacccgtcaggtggtgcacaacaagctgacctcttgcaactacaaccccctgtacctcgaggctgacggtcgtatccgttgcggcaaggtcaacgacaaggctcagtacctgctgggtgctgctggttccgtgccctaccgttggatcaacctcgagtacgacaagatcacccgtatcgtgggcctggaccagtacctcgagtccgtgaagaagcacaagcgtctggacgtgtgccgtgctaagatgggttacatgctgcagtaaaagcttgtcgagaagtactagaggatcataatcagccataccacatttgtagaggttttacttgctttaaaaaacctcccacacctccccctgaacctgaaacataaaatgaatgcaattgttgttgttaacttgtttattgcagcttataatggttacaaataaagcaatagcatcacaaatttcacaaataaagcatttttttcactgcattctagttgtggtttgtccaaactcatcaatgtatcttatcatgtctggatctgatcactgcttgagcctagaagatccggctgctaacaaagcccgaaaggaagctgagttggctgctgtggctagctttgtttaactttaagaaggagatacatctagaccggaatattaatagatcatggagataattaaaatgataaccatctcgcaaataaataagtattttactgttttcgtaacagttttgtaataaaaaaacctataaatattccggattattcataccgtcccaccatcgggcgcggatccgccaccatgctgcgtctgctgctgcgtcaccacttccactgcctgctgctgtgcgctgtgtgggctaccccctgcctggcttccccttggtccaccctgaccgctaaccagaacccctccccaccctggtccaagctgacctactccaagccccacgacgctgctaccttctactgccccttcctgtacccatccccccctcgttccccactgcagttctccggtttccagcgtgtgctgaccggtcccgagtgccgtaacgagactctgtacctgctgtacaaccgcgagggccagaccctggtcgagaggtcctccacctgggtcaagaaggtcatctggtacttgtccggtcgtaaccagaccatcctgcagcgtatgccccgtaccgcttccaagccctccgacggcaacgtgcagatctccgtcgaggacgctaagatcttcggtgctcacatggtgcccaagcagaccaagctgctgcgtttcgtggtcaacgacggcacccgttaccagatgtgcgtgatgaagctcgagtcctgggctcacgtgttccgtgactactccgtgtccttccaagtgcgcctgaccttcaccgaggctaacaaccagacctacaccttctgcacccaccccaacctgatcgtgtaaaagcttgtcgagaagtactagaggatcataatcagccataccacatttgtagaggttttacttgctttaaaaaacctcccacacctccccctgaacctgaaacataaaatgaatgcaattgttgttgttaacttgtttattgcagcttataatggttacaaataaagcaatagcatcacaaatttcacaaataaagcatttttttcactgcattctagttgtggtttgtccaaactcatcaatgtatcttatcatgtctggatctgatcactgcttgagcctagaagatccggctgctaacaaagcccgaaaggaagctgagttggctgctgggtgcctaatgagtgagctaactcacattaattgcccggaatattaatagatcatggagataattaaaatgataaccatctcgcaaataaataagtattttactgttttcgtaacagttttgtaataaaaaaacctataaatattccggattattcataccgtcccaccatcgggcgcggatccgccaccatgcgtctgtgccgtgtgtggctgtccgtgtgcctgtgcgctgtggtgctgggccagtgccagcgtgaaaccgctgagaagaacgactactaccgtgtgccccactactgggacgcttgctcccgtgctctgcccgaccagacccgttacaagtacgtcgagcagctggtggacctgaccctgaactaccactacgacgcttcccacggcctggacaacttcgacgtgctgaagcgtatcaacgtgaccgaggtgtccctgctgatctccgacttccgtcgtcagaaccgtcgtggtggcaccaacaagcgtaccaccttcaacgctgctggttccctggctccccacgctcgttccctcgagttctccgtgcgtctgttcgctaactaaaagcttgtcgagaagtactagaggatcataatcagccataccacatttgtagaggttttacttgctttaaaaaacctcccacacctccccctgaacctgaaacataaaatgaatgcaattgttgttgttaacttgtttattgcagcttataatggttacaaataaagcaatagcatcacaaatttcacaaataaagcatttttttcactgcattctagttgtggtttgtccaaactcatcaatgtatcttatcatgtctggatctgatcactgcttgagcctagaagatccggctgctaacaaagcccgaaaggaagctgagttggctgctgccaccgctgagcaataactatcataacccccggaatattaatagatcatggagataattaaaatgataaccatctcgcaaataaataagtattttactgttttcgtaacagttttgtaataaaaaaacctataaatattccggattattcataccgtcccaccatcgggcgcggatcccggtccgaagcgcgcggaattcaaaggcctaccgtcgacgccaccatggaatcccgtatctggtgcctggtcgtgtgcgtgaacctgtgcatcgtgtgcctgggtgctgctgtgtcctcctcctccacccgtggcacctccgctacccactcccaccactcctcccacaccacctccgccgctcactcccgttccggttccgtgtcccagcgtgtgacctcctcccagaccgtgtcccacggtgtcaacgagactatctacaacaccaccctgaagtacggcgacgtcgtgggtgtcaacaccaccaagtacccctaccgtgtgtgctccatggctcagggcaccgacctgatccgtttcgagcgtaacatcgtgtgcacctccatgaagcccatcaacgaggacctggacgagggtatcatggtggtgtacaagcgcaacatcgtggctcacaccttcaaggtccgcgtgtaccagaaggtgctgaccttccgtcgttcctacgcttacatccacaccacttacctgctgggttccaacaccgagtacgtggcccctcccatgtgggagatccaccacatcaactcccactcccagtgctactcctcttactcccgtgtgatcgctggcaccgtgttcgtggcttaccaccgtgactcctacgagaacaagaccatgcagctgatgcccgacgactactccaacacccactccacccgttacgtgaccgtgaaggaccagtggcactcccgtggttccacctggctgtaccgtgaaacctgcaacctgaactgcatggtcaccatcaccaccgctcgttccaagtacccttaccacttcttcgctacctccaccggcgacgtggtggacatctcccccttctacaacggtactaaccgtaacgcttcctacttcggcgagaacgctgacaagttcttcatcttccccaactacaccatcgtgtccgacttcggtcgtcccaactccgctctggaaacccaccgtctggtggctttcttggagcgtgctgactccgtgatctcctgggacatccaggacgagaagaacgtgacctgccagctgaccttctgggaggcttccgagcgtaccatccgttccgaggctgaggactcctaccacttctccagcgctaagatgaccgctaccttcctgtccaagaaacaagaggtcaacatgtccgactccgccctggactgcgtgcgtgacgaggctatcaacaagctgcagcagatcttcaacacctcctacaaccagacctacgagaagtacggaaacgtgtccgtgttcgagactaccggtggcctggtggtgttctggcagggtatcaagcagaagtccctggtcgagctggaacgtctggctaaccgttcctccctgaacctgacccacaaccgtaccaagcgttccaccgacggcaacaacgctactcacctgtccaacatggaatccgtgcacaacctggtgtacgctcagctgcagttcacctacgacaccctgcgcggttacatcaaccgtgctctggctcagatcgctgaggcttggtgcgtggaccagcgtcgtaccctggaagtgttcaaggaactgtccaagatcaacccctccgctatcctgtccgccatctacaacaagcctatcgctgctcgtttcatgggcgacgtgctgggcctggcttcctgcgtgaccatcaaccagacttccgtgaaggtgctgcgtgacatgaacgtgaaggaatcccccggtcgttgctactcccgtcccgtggtcatcttcaacttcgctaactcctcctacgtgcagtacggccagctgggcgaggacaacgagatcctgctgggcaaccaccgtaccgaggaatgccagctgccctccctgaagatcttcatcgctggcaactccgcttacgaatacgtggactacctgttcaagcgcatgatcgacctgtcctccatctctaccgtggactccatgatcgctctggacatcgaccccctggaaaacaccgacttccgtgtgctggaactgtactcccagaaggaactgcgttccatcaacgtgttcgacctggaagagatcatgcgcgagttcaactcctacaagcagcgtgttaagtacgtcgaggacaaggtggtggaccccctgcccccctacctgaagggactggacgacctgatgtccggcctgggagctgccggcaaggctgtgggtgtcgctatcggtgctgtgggtggtgctgtggcttccgtggtcgagggtgtcgccaccttcctgaagaaccccttcggtgctttcaccatcatcctggtggctatcgctgtggtcatcatcatctacctgatctacacccgtcagcgtcgtctgtgcatgcagcccctgcagaacctgttcccctacctggtgtccgctgacggtactaccgtgacctccggcaacaccaaggacacctccctgcaggctcccccatcctacgaggaatccgtctacaactccggtcgcaagggtcccggtcccccttcctccgacgcttctaccgctgctcccccatacaccaacgagcaggcttaccagatgctgctggctctcgtgcgtctggacgctgagcagcgtgcacagcagaacggcaccgactccctggacggccagaccggaacccaggacaagggccagaagcccaacctgctggaccgtctgcgtcaccgcaagaacggttaccgtcacctgaaggactccgacgaggaagagaacgtctaaggcgcgccaagcttgtcgagaagtactagagatcataatcagccataccacatttgtagaggttttacttgctttaaaaaacctcccacacctccccctgaacctgaaacataaaatgaatgcaattgttgttgttaacttgtttattgcagcttataatggttacaaataaagcaatagcatcacaaatttcacaaataaagcatttttttcactgcattctagttgtggtttgtccaaactcatcaatgtatcttatcatgtctggatctgatcactgcttgagcctagaagatccggctgctaacaaagcccgaaaggaagctgggaatattaatagatcatggagataattaaaatgataaccatctcgcaaataaataagtattttactgttttcgtaacagttttgtaataaaaaaacctataaatattccggattattcataccgtcccaccatcgggcgcggatccgccaccatgcgtcccggcctgccctcctacctgatcgtgctggctgtgtgcctgctgtcccacctcctgtcctcccgttacggtgctgaggctatctccgagcccctggacaaggctttccacctcctgctgaacacctacggtcgtcctatccgtttcctgcgcgagaacaccacccagtgcacctacaactcctccctgcgcaactccaccgtcgtccgcgagaacgctatctccttcaacttcttccagtcctacaaccagtactacgtgttccacatgccccgttgcctgttcgctggtcccctggctgagcagttcctgaaccaggtggacctgaccgagactctcgagcgttaccagcagcgtctgaacacttacgctctggtgtccaaggacctggcttcctaccgttccttcagccagcagctgaaggctcaggactccctgggcgagcagcccaccactgtgcctccccctatcgacctgtccatcccccacgtgtggatgcccccccagaccactcctcacggctggaccgagtcccacaccacctccggactgcaccgtccccacttcaaccagacctgcatcctgttcgacggtcacgacctgctgttctccaccgtgaccccctgcctgcaccagggcttctacctcatcgacgagctgcgttacgtgaagatcaccctgaccgaggatttcttcgtggtcaccgtgtccatcgacgacgacacccccatgctgctgatcttcggtcacctcccccgtgtgctgttcaaggctccctaccagcgtgacaacttcatcctgcgtcagaccgagaagcacgagctgctggtgctggtcaagaaggaccagctgaaccgtcactcttacctgaaggaccccgacttcctggacgctgctctggacttcaactacctggacctgtccgctctgctgaggaactccttccaccgttacgctgtggacgtgctgaagtccggtcgttgccagatgctggaccgtcgtaccgtcgagatggctttcgcttacgccctggctctgttcgctgctgctcgtcaagaagaggctggcgctcaggtgtccgtgccccgtgctctggaccgtcaggctgctctgctgcagatccaagagttcatgatcacttgcctgtcccagaccccccctcgtaccaccctgctgctgtaccccaccgctgtggacctggctaagcgtgctctgtggacccccaaccagatcaccgacatcacctccctcgtgcgtctggtgtacatcctgtccaagcagaaccagcagcacctgatcccccagtgggctctgcgtcagatcgctgacttcgctctgaagctgcacaagacccacctggcttcattcctcagcgctttcgctcgccaagagctgtacctgatgggttccctggtgcactccatgctggtgcacaccaccgagcgtcgcgagatcttcatcgtggaaaccggcctgtgctccctggccgagctgtcccacttcacccagctgctggctcacccccaccacgagtacctgtccgacctgtacaccccctgctcctcttccggtcgtcgtgaccactccctggaacgtctgacccgtctgttccccgacgctaccgtgcctaccaccgtgcctgctgctctgtccatcctgtctaccatgcagccctccaccctggaaaccttccccgacctgttctgcctgcctctgggcgagtccttctccgctctgaccgtgtccgagcacgtgtcctacgtggtcaccaaccagtacctgatcaagggcatctcctaccccgtgtccaccaccgtcgtgggccagtccctgatcatcacccagaccgactcccagaccaagtgcgagctgacccgtaacatgcacaccactcactccatcaccgctgctctgaacatctccctcgagaactgcgctttctgccagtccgctctgttggagtacgacgacactcagggtgtcatcaacatcatgtacatgcacgactccgacgacgtgctgttcgctctggacccctacaacgaggtggtggtgtcctccccccgtacccactacctgatgctgctgaagaacggcaccgtgctggaagtgaccgacgtggtggtggacgctaccgaccgtctgctgatgatgtccgtgtacgctctgtccgctatcatcggcatctacctgctgtaccgtatgctgaagacctgctaaggcgccaagctttgtcgagaagtactagaggatcataatcagccataccacatttgtagaggttttacttgctttaaaaaacctcccacacctccccctgaacctgaaacataaaatgaatgcaattgttgttgttaacttgtttattgcagcttataatggttacaaataaagcaatagcatcacaaatttcacaaataaagcatttttttcactgcattctagttgtggtttgtccaaactcatcaatgtatcttatcatgtctggatctgatcactgcttgagcctagaagatccggctgctaacaaagcccgaaaggaagctgagttggctgctgctgagtagtgcgcgagcaaaatttaagctacaacaaggcacgcgtccggaatattaatagatcatggagataattaaaatgataaccatctcgcaaataaataagtattttactgttttcgtaacagttttgtaataaaaaaacctataaatattccggattattcataccgtcccaccatcgggcgcggatcccggtccgaagcgcgcggaattcaaaggcctacgtcgacgccaccatggaatcccgtggtcgtcgttgccccgagatgatctccgtgctgggtcccatctccggtcacgtcctgaaggctgtgttctcccgtggcgacacccccgtgctgccccacgaaactcgtctgctgcagaccggtatccacgtgcgtgtgtcccagccctccctgatcctggtgtcccagtacacccccgactccaccccttgccaccgcggagacaaccagctgcaggtccagcacacctacttcaccggttccgaggtcgagaacgtgtccgtgaacgtgcacaaccccaccggtcgttccatctgcccctcccaagagcccatgtccatctacgtgtacgctctgcccctgaagatgctgaacatcccctccatcaacgtgcaccactacccctccgctgctgagcgcaagcaccgtcacctccccgtggctgacgctgtgatccacgcttccggcaagcagatgtggcaggctcgtctgaccgtgtccggcctggcttggacccgtcagcagaaccagtggaaggaacccgacgtgtactacacctccgctttcgtgttccccaccaaggacgtggccctgcgtcacgtcgtgtgcgctcacgaactcgtgtgctccatggaaaacacccgtgctaccaagatgcaagtgatcggcgaccagtacgtgaaggtgtacctggaatccttctgcgaggacgtgccctccggcaagctgttcatgcacgtgaccctgggttccgacgtggaagaggacctgaccatgacccgtaacccccagcccttcatgcgtccccacgagcgtaacggtttcaccgtgctgtgccccaagaacatgatcatcaagcccggcaagatctcccacatcatgctggacgtggccttcacctcccacgagcacttcggcctgctgtgccctaagtccatccccggcctgtccatctccggcaacctgctgatgaacggccagcagatcttcctggaagtgcaggctatccgtgaaaccgtcgagctgcgtcagtacgaccctgtggctgctctgttcttcttcgacatcgacctgctgctgcagcgtggtccccagtactccgagcaccccaccttcaccagccagtaccgtatccagggcaagctggaataccgtcacacctgggaccgtcacgacgagggtgctgctcagggcgacgacgacgtgtggacctccggttccgactccgacgaggaactggtcaccaccgagcgcaagaccccccgtgtgaccggtggtggtgctatggctggtgcttccacctccgctggtcgcaagcgcaagtccgcttcctccgctaccgcttgcaccgctggtgtcatgacccgtggtcgcctgaaggctgagtccaccgtggctcccgaagaggacactgacgaggactccgacaacgagatccacaaccccgctgtgttcacctggcccccctggcaggctggtatcctggctcgtaacctggtgcccatggtggctaccgtgcagggccagaacctgaagtaccaagagttcttctgggacgccaacgacatctaccgtatcttcgctgagctggaaggcgtgtggcagcccgctgctcagcccaagcgtcgtcgtcaccgtcaggacgctctgcctggtccctgtatcgcttccacccccaagaagcaccgcggctaaaagcttgtcgagaagtactagaggatcataatcagccataccacatttgtagaggttttacttgctttaaaaaacctcccacacctccccctgaacctgaaacataaaatgaatgcaattgttgttgttaacttgtttattgcagcttataatggttacaaataaagcaatagcatcacaaatttcacaaataaagcatttttttcactgcattctagttgtggtttgtccaaactcatcaatgtatcttatcatgtctggatctgatcactgcttgagcctagaagatccggctgctaacaaagcccgaaaggaagctgagttggctgctgccaccgctgagcaataactatcataacccctaggagatccgaaccagataagtgaaatctagttccaaactattttgtcatttttaattttcgtattagcttacgacgctacacccagttcccatctattttgtcactcttccctaaataatccttaaaaactccatttccacccctcccagttcccaactattttgtccgcccaca

SEQ ID NO: 20 - DNA, 4743 bp, Artificial Sequence
  Synthetic construct
ttgttccagtttggaacaagagtccactattaaagaacgtggactccaacgtcaaagggcgaaaaaccgtctatcagggcgatggcccactacgtgaaccatcaccctaatcaagttttttggggtcgaggtgccgtaaagcactaaatcggaaccctaaagggagcccccgatttagagcttgacggggaaagccggcgaacgtggcgagaaaggaagggaagaaagcgaaaggagcgggcgctagggcgctggcaagtgtagcggtcacgctgcgcgtaaccaccacacccgccgcgcttaatgcgccgctacagggcgcgtcgcgccattcgccattcaggctgcgcaactgttgggaagggcgatcggtgcgggcctcttcgctattacgccagctggcgaaagggggatgtgctgcaaggcgattaagttgggtaacgccagggttttcccagtcacgacgttgtaaaacgacggccagtgcatagaccagccgcgtaacctggcaaaatcggttacggttgagtaataaatggatgccctgcgtaagcgggtgtgggcggacaataaagtcttaaactgaacaaaatagatctaaactatgacaataaagtcttaaactagacagaatagttgtaaactgaaatcagtccagttatgctgtgaaaaagcatactggacttttgttatggctaaagcaaactcttcattttctgaagtgcaaattgcccgtcgtattaaagaggggcgtggccaagggcatggtaaagactatattcgcggcgttgtgacaatttaccgaacaactccgcggccgggaagccgatctcggcttgaacgaattgttaggtggcggtacttgggtcgatatcaaagtgcatcacttcttcccgtatgcccaactttgtatagagagccactgcgggatcgtcaccgtaatctgcttgcacgtagatcacataagcaccaagcgcgttggcctcatgcttgaggagattgatgagcgcggtggcaatgccctgcctccggtgctcgccggagactgcgagatcatagatatagatctcactacgcggctgctcaaacttgggcagaacgtaagccgcgagagcgccaacaaccgcttcttggtcgaaggcagcaagcgcgatgaatgtcttactacggagcaagttcccgaggtaatcggagtccggctgatgttgggagtaggtggctacgtctccgaactcacgaccgaaaagatcaagagcagcccgcatggatttgacttggtcagggccgagcctacatgtgcgaatgatgcccatacttgagccacctaactttgttttagggcgactgccctgctgcgtaacatcgttgctgctgcgtaacatcgttgctgctccataacatcaaacatcgacccacggcgtaacgcgcttgctgcttggatgcccgaggcatagactgtacaaaaaaacagtcataacaagccatgaaaaccgccactgcgccgttaccaccgctgcgttcggtcaaggttctggaccagttgcgtgagcgcatacgctacttgcattacagtttacgaaccgaacaggcttatgtcaactgggttcgtgccttcatccgtttccacggtgtgcgtcacccggcaaccttgggcagcagcgaagtcgaggcatttctgtcctggctggcgaacgagcgcaaggtttcggtctccacgcatcgtcaggcattggcggccttgctgttcttctacggcaaggtgctgtgcacggatctgcccttgcttcaggagatcggtagacctcggccgtcgcggcgcttgccggtggtgctgaccccggatgaagtggttcgcatcctcggttttctggaaggcgagcatcgtttgttcgcccaggactctagctatagttctagtggttggctacagctttgtttgtactatcaacaggttgaactgctgatcaacagatcctctacgcggccgcggtaccataacttcgtatagcatacattatacgaagttatctggtttaaacgtacccgtagtggctatggcagggcttgccgccccgacgttggctgcgagccctgggccttcacccgaacttgggggttggggtggggaaaaggaagaaacgcgggcgtattggtcccaatggggtctcggtggggtatcgacagagtgccagccctgggaccgaaccccgcgtttatgaacaaacgacccaacacccgtgcgttttattctgtctttttattgccgtcatagcgcgggttccttccggtattgtctccttccgtgtttcagttagcctcccccatctcccggtaccgcatgctatgcatcagctgctagcaccatggctcgagatcccgggtgatcaagtcttcgtcgagtgattgtaaataaaatgtaatttacagtatagtattttaattaatatacaaatgatttgataataattcttatttaactataatatattgtgttgggttgaattaaaggtccgtatactagtatcgattcgcgacctactccggaatattaatagatcatggagataattaaaatgataaccatctcgcaaataaataagtattttactgttttcgtaacagttttgtaataaaaaaacctataaatattccggattattcataccgtcccaccatcgggcgcggatccgccaccatgggtgctcgtgcttcagtgctgtccggtggcgagctggacaagtgggagaagatccgtctgcgtcccggtggcaagaagcagtacaagctgaagcacatcgtgtgggcttcccgcgagctggaacgtttcgctgtgaaccccggcctgctggaaacctccgagggttgccgtcagatcctgggccagctgcagccctccctgcagaccggttccgaggaactgcgttccctgtacaacactatcgctgtgctgtactgcgtgcaccagcgtatcgacgtgaaggacaccaaggaagctctggacaagatcgaggaagaacagaacaagtccaagaagaaggcccagcaggctgctgctgacaccggcaacaactcccaggtgtcccagaactaccccatcgtgcagaacctgcagggccagatggtgcaccaggctatctccccccgtaccctgaacgcttgggtcaaggtggtggaagagaaggctttcagccccgaagtgatccccatgttctccgctctgtccgagggtgctaccccccaggacctgaacaccatgctgaacaccgtgggtggtcaccaggctgctatgcagatgctgaaggaaaccatcaacgaagaggctgctgagtgggaccgtctgcaccccgtgcacgctggtcctatcgctcccggacagatgcgcgagccccgtggttccgacatcgctggaaccacctccaccctgcaagagcagatcggctggatgacccacaacccccccatccccgtgggcgagatctacaagcgttggatcatcctgggcctgaacaagatcgtgcgtatgtactcccccacctccatcctggacatccgtcagggtcccaaggaacccttccgtgactacgtggaccgtttctacaagaccctgcgtgccgagcaggcttcccaagaggtcaagaactggatgaccgagactctgctggtgcagaacgctaaccccgactgcaagaccatcctgaaggctctgggtcccggtgctaccctggaagagatgatgaccgcttgccagggtgtcggtggtcccggtcacaaggctcgtgtgctggctgaggctatgtcccaagtgaccaaccccgctaccatcatgatccagaagggcaacttccgtaaccagcgcaagaccgtgaagtgcttcaactgcggcaaggaaggccacatcgctaagaactgccgtgctccccgcaagaagggctgctggaagtgcggaaaggaaggacaccagatgaaggactgcaccgagcgtcaggctaacttcctgggcaagatctggccctcccacaagggtcgtcccggcaacttcctgcagtcccgtcccgagcccaccgctcccccagaggaatccttccgtttcggcgaggaaaccaccaccccatcccagaagcaagagcccatcgacaaggaactgtaccccctggcttccctgcgctccctgttcggttccgacccatcctcccagtaaggcgccaagcttgtcgagaagtactagaggatcataatcagccataccacatttgtagaggttttacttgctttaaaaaacctcccacacctccccctgaacctgaaacataaaatgaatgcaattgttgttgttaacttgtttattgcagcttataatggttacaaataaagcaatagcatcacaaatttcacaaataaagcatttttttcactgcattctagttgtggtttgtccaaactcatcaatgtatcttatcatgtctggatctgatcactgcttgagcctagaagatccggctgctaacaaagcccgaaaggaagctgagttggctgctgccaccgctgagcaataactatcataacccctaggagatccgaaccagataagtgaaatctagttccaaactattttgtcatttttaattttcgtattagcttacgacgctacacccagttcccatctattttgtcactcttccctaaataatccttaaaaactccatttccacccctcccagttcccaactattttgtccgcccaca

SEQ ID NO: 21 - DNA, 4925 bp, Artificial Sequence
  Synthetic construct
ttgttccagtttggaacaagagtccactattaaagaacgtggactccaacgtcaaagggcgaaaaaccgtctatcagggcgatggcccactacgtgaaccatcaccctaatcaagttttttggggtcgaggtgccgtaaagcactaaatcggaaccctaaagggagcccccgatttagagcttgacggggaaagccggcgaacgtggcgagaaaggaagggaagaaagcgaaaggagcgggcgctagggcgctggcaagtgtagcggtcacgctgcgcgtaaccaccacacccgccgcgcttaatgcgccgctacagggcgcgtcgcgccattcgccattcaggctgcgcaactgttgggaagggcgatcggtgcgggcctcttcgctattacgccagctggcgaaagggggatgtgctgcaaggcgattaagttgggtaacgccagggttttcccagtcacgacgttgtaaaacgacggccagtgcatagaccagccgcgtaacctggcaaaatcggttacggttgagtaataaatggatgccctgcgtaagcgggtgtgggcggacaataaagtcttaaactgaacaaaatagatctaaactatgacaataaagtcttaaactagacagaatagttgtaaactgaaatcagtccagttatgctgtgaaaaagcatactggacttttgttatggctaaagcaaactcttcattttctgaagtgcaaattgcccgtcgtattaaagaggggcgtggccaagggcatggtaaagactatattcgcggcgttgtgacaatttaccgaacaactccgcggccgggaagccgatctcggcttgaacgaattgttaggtggcggtacttgggtcgatatcaaagtgcatcacttcttcccgtatgcccaactttgtatagagagccactgcgggatcgtcaccgtaatctgcttgcacgtagatcacataagcaccaagcgcgttggcctcatgcttgaggagattgatgagcgcggtggcaatgccctgcctccggtgctcgccggagactgcgagatcatagatatagatctcactacgcggctgctcaaacttgggcagaacgtaagccgcgagagcgccaacaaccgcttcttggtcgaaggcagcaagcgcgatgaatgtcttactacggagcaagttcccgaggtaatcggagtccggctgatgttgggagtaggtggctacgtctccgaactcacgaccgaaaagatcaagagcagcccgcatggatttgacttggtcagggccgagcctacatgtgcgaatgatgcccatacttgagccacctaactttgttttagggcgactgccctgctgcgtaacatcgttgctgctgcgtaacatcgttgctgctccataacatcaaacatcgacccacggcgtaacgcgcttgctgcttggatgcccgaggcatagactgtacaaaaaaacagtcataacaagccatgaaaaccgccactgcgccgttaccaccgctgcgttcggtcaaggttctggaccagttgcgtgagcgcatacgctacttgcattacagtttacgaaccgaacaggcttatgtcaactgggttcgtgccttcatccgtttccacggtgtgcgtcacccggcaaccttgggcagcagcgaagtcgaggcatttctgtcctggctggcgaacgagcgcaaggtttcggtctccacgcatcgtcaggcattggcggccttgctgttcttctacggcaaggtgctgtgcacggatctgcccttgcttcaggagatcggtagacctcggccgtcgcggcgcttgccggtggtgctgaccccggatgaagtggttcgcatcctcggttttctggaaggcgagcatcgtttgttcgcccaggactctagctatagttctagtggttggctacagctttgtttgtactatcaacaggttgaactgctgatcaacagatcctctacgcggccgcggtaccataacttcgtatagcatacattatacgaagttatctggtttaaacgtacccgtagtggctatggcagggcttgccgccccgacgttggctgcgagccctgggccttcacccgaacttgggggttggggtggggaaaaggaagaaacgcgggcgtattggtcccaatggggtctcggtggggtatcgacagagtgccagccctgggaccgaaccccgcgtttatgaacaaacgacccaacacccgtgcgttttattctgtctttttattgccgtcatagcgcgggttccttccggtattgtctccttccgtgtttcagttagcctcccccatctcccggtaccgcatgctatgcatcagctgctagcaccatggctcgagatcccgggtgatcaagtcttcgtcgagtgattgtaaataaaatgtaatttacagtatagtattttaattaatatacaaatgatttgataataattcttatttaactataatatattgtgttgggttgaattaaaggtccgtatactagtatcgattcgcgacctactccggaatattaatagatcatggagataattaaaatgataaccatctcgcaaataaataagtattttactgttttcgtaacagttttgtaataaaaaaacctataaatattccggattattcataccgtcccaccatcgggcgcggatccgccaccatgggtgctcgtgcttcagtgctgtccggtggcgagctggacaagtgggagaagatccgtctgcgtcccggtggcaagaagcagtacaagctgaagcacatcgtgtgggcttcccgcgagctggaacgtttcgctgtgaaccccggcctgctggaaacctccgagggttgccgtcagatcctgggccagctgcagccctccctgcagaccggttccgaggaactgcgttccctgtacaacactatcgctgtgctgtactgcgtgcaccagcgtatcgacgtgaaggacaccaaggaagctctggacaagatcgaggaagaacagaacaagtccaagaagaaggcccagcaggctgctgctgacaccggcaacaactcccaggtgtcccagaactaccccatcgtgcagaacctgcagggccagatggtgcaccaggctatctccccccgtaccctgaacgcttgggtcaaggtggtggaagagaaggctttcagccccgaagtgatccccatgttctccgctctgtccgagggtgctaccccccaggacctgaacaccatgctgaacaccgtgggtggtcaccaggctgctatgcagatgctgaaggaaaccatcaacgaagaggctgctgagtgggaccgtctgcaccccgtgcacgctggtcctatcgctcccggacagatgcgcgagccccgtggttccgacatcgctggaaccacctccaccctgcaagagcagatcggctggatgacccacaacccccccatccccgtgggcgagatctacaagcgttggatcatcctgggcctgaacaagatcgtgcgtatgtactcccccacctccatcctggacatccgtcagggtcccaaggaacccttccgtgactacgtggaccgtttctacaagaccctgcgtgccgagcaggcttcccaagaggtcaagaactggatgaccgagactctgctggtgcagaacgctaaccccgactgcaagaccatcctgaaggctctgggtcccggtgctaccctggaagagatgatgaccgcttgccagggtgtcggtggtcccggtcacaaggctcgtgtgctggctgaggctatgtcccaagtgaccaaccccgctaccatcatgatccagaagggcaacttccgtaaccagcgcaagaccgtgaagtgcttcaactgcggcaaggaaggccacatcgctaagaactgccgtgctccccgcaagaagggctgctggaagtgcggaaaggaaggacaccagatgaaggactgcaccgagcgtcaggctaacttcctgggcaagatctggccctcccacaagggtcgtcccggcaacttcctgcagtcccgtcccgagcccaccgctcccccagaggaatccttccgtttcggcgaggaaaccaccaccccatcccagaagcaagagcccatcgacaaggaactgtaccccctggcttccctgcgctccctgttcggttccgacccatcctcccagggtggtggtggctccggtggttcctcaggtggcggaggtagtgcccagctgaagaagaagctccaggctctcaagaagaagaacgcccaactgaaatggaagctgcaagccttgaagaagaagttggcccaattgaagaagaagaaccaagccctgaagtggaagttggctcagtaaaagcttttaattaaaagcttgtcgagaagtactagaggatcataatcagccataccacatttgtagaggttttacttgctttaaaaaacctcccacacctccccctgaacctgaaacataaaatgaatgcaattgttgttgttaacttgtttattgcagcttataatggttacaaataaagcaatagcatcacaaatttcacaaataaagcatttttttcactgcattctagttgtggtttgtccaaactcatcaatgtatcttatcatgtctggatctgatcactgcttgagcctagaagatccggctgctaacaaagcccgaaaggaagctgagttggctgctgccaccgctgagcaataactatcataacccctaggagatccgaaccagataagtgaaatctagttccaaactattttgtcatttttaattttcgtattagcttacgacgctacacccagttcccatctattttgtcactcttccctaaataatccttaaaaactccatttccacccctcccagttcccaactattttgtccgcccaca

SEQ ID NO: 22 - DNA, 6483 bp, Artificial Sequence
  Synthetic construct
tgtgggcggacaaaatagttgggaactgggaggggtggaaatggagtttttaaggattatttagggaagagtgacaaaatagatgggaactgggtgtagcgtcgtaagctaatacgaaaattaaaaatgacaaaatagtttggaactagatttcacttatctggttcggatctcctaggggttatgatagttattgctcagcggtggcagcagccaactcagcttcctttcgggctttgttagcagccggatcttctaggctcaagcagtgatcagatccagacatgataagatacattgatgagtttggacaaaccacaactagaatgcagtgaaaaaaatgctttatttgtgaaatttgtgatgctattgctttatttgtaaccattataagctgcaataaacaagttaacaacaacaattgcattcattttatgtttcaggttcagggggaggtgtgggaggttttttaaagcaagtaaaacctctacaaatgtggtatggctgattatgatcctctagtacttctcgacaagcttttagccgcggtgcttcttgggggtggaagcgatacagggaccaggcagagcgtcctgacggtgacgacgacgcttgggctgagcagcgggctgccacacgccttccagctcagcgaagatacggtagatgtcgttggcgtcccagaagaactcttggtacttcaggttctggccctgcacggtagccaccatgggcaccaggttacgagccaggataccagcctgccaggggggccaggtgaacacagcggggttgtggatctcgttgtcggagtcctcgtcagtgtcctcttcgggagccacggtggactcagccttcaggcgaccacgggtcatgacaccagcggtgcaagcggtagcggaggaagcggacttgcgcttgcgaccagcggaggtggaagcaccagccatagcaccaccaccggtcacacggggggtcttgcgctcggtggtgaccagttcctcgtcggagtcggaaccggaggtccacacgtcgtcgtcgccctgagcagcaccctcgtcgtgacggtcccaggtgtgacggtattccagcttgccctggatacggtactggctggtgaaggtggggtgctcggagtactggggaccacgctgcagcagcaggtcgatgtcgaagaagaacagagcagccacagggtcgtactgacgcagctcgacggtttcacggatagcctgcacttccaggaagatctgctggccgttcatcagcaggttgccggagatggacaggccggggatggacttagggcacagcaggccgaagtgctcgtgggaggtgaaggccacgtccagcatgatgtgggagatcttgccgggcttgatgatcatgttcttggggcacagcacggtgaaaccgttacgctcgtggggacgcatgaagggctgggggttacgggtcatggtcaggtcctcttccacgtcggaacccagggtcacgtgcatgaacagcttgccggagggcacgtcctcgcagaaggattccaggtacaccttcacgtactggtcgccgatcacttgcatcttggtagcacgggtgttttccatggagcacacgagttcgtgagcgcacacgacgtgacgcagggccacgtccttggtggggaacacgaaagcggaggtgtagtacacgtcgggttccttccactggttctgctgacgggtccaagccaggccggacacggtcagacgagcctgccacatctgcttgccggaagcgtggatcacagcgtcagccacggggaggtgacggtgcttgcgctcagcagcggaggggtagtggtgcacgttgatggaggggatgttcagcatcttcaggggcagagcgtacacgtagatggacatgggctcttgggaggggcagatggaacgaccggtggggttgtgcacgttcacggacacgttctcgacctcggaaccggtgaagtaggtgtgctggacctgcagctggttgtctccgcggtggcaaggggtggagtcgggggtgtactgggacaccaggatcagggagggctgggacacacgcacgtggataccggtctgcagcagacgagtttcgtggggcagcacgggggtgtcgccacgggagaacacagccttcaggacgtgaccggagatgggacccagcacggagatcatctcggggcaacgacgaccacgggattccatgggcccagggttggactcgacgacgtctcccgcaagcttaagaaggtcaaaattcaacagctgctgggaggatgggtcggaaccgaacagggagcgcagggaagccagggggtacagttccttgtcgatgggctcttgcttctgggatggggtggtggtttcctcgccgaaacggaaggattcctctgggggagcggtgggctcgggacgggactgcaggaagttgccgggacgacccttgtgggagggccagatcttgcccaggaagttagcctgacgctcggtgcagtccttcatctggtgtccttcctttccgcacttccagcagcccttcttgcggggagcacggcagttcttagcgatgtggccttccttgccgcagttgaagcacttcacggtcttgcgctggttacggaagttgcccttctggatcatgatggtagcggggttggtcacttgggacatagcctcagccagcacacgagccttgtgaccgggaccaccgacaccctggcaagcggtcatcatctcttccagggtagcaccgggacccagagccttcaggatggtcttgcagtcggggttagcgttctgcaccagcagagtctcggtcatccagttcttgacctcttgggaagcctgctcggcacgcagggtcttgtagaaacggtccacgtagtcacggaagggttccttgggaccctgacggatgtccaggatggaggtgggggagtacatacgcacgatcttgttcaggcccaggatgatccaacgcttgtagatctcgcccacggggatgggggggttgtgggtcatccagccgatctgctcttgcagggtggaggtggttccagcgatgtcggaaccacggggctcgcgcatctgtccgggagcgataggaccagcgtgcacggggtgcagacggtcccactcagcagcctcttcgttgatggtttccttcagcatctgcatagcagcctggtgaccacccacggtgttcagcatggtgttcaggtcctggggggtagcaccctcggacagagcggagaacatggggatcacttcggggctgaaagccttctcttccaccaccttgacccaagcgttcagggtacggggggagatagcctggtgcaccatctggccctgcaggttctgcacgatggggtagttctgggacacctgggagttgttgccggtgtcagcagcagcctgctgggccttcttcttggacttgttctgttcttcctcgatcttgtccagagcttccttggtgtccttcacgtcgatacgctggtgcacgcagtacagcacagcgatagtgttgtacagggaacgcagttcctcggaaccggtctgcagggagggctgcagctggcccaggatctgacggcaaccctcggaggtttccagcaggccggggttcacagcgaaacgttccagctcgcgggaagcccacacgatgtgcttcagcttgtactgcttcttgccaccgggacgcagacggatcttctcccacttgtccagctcgccaccggacagcactgaagcacgagcacccatggtggcggatccgcgcccgatggtgggacggtatgaataatccggaatatttataggtttttttattacaaaactgttacgaaaacagtaaaatacttatttatttgcgagatggttatcattttaattatctccatgatctattaatattccggagtaggtcgcgaatcgatactagtatacggacctttaattcaacccaacacaatatattatagttaaataagaattattatcaaatcatttgtatattaattaaaatactatactgtaaattacattttatttacaatcactcgacgaagacttgatcacccgggatctcgagccatggtgctagcagctgatgcatagcatgcggtaccgggagatgggggaggctaactgaaacacggaaggagacaataccggaaggaacccgcgctatgacggcaataaaaagacagaataaaacgcacgggtgttgggtcgtttgttcataaacgcggggttcggtcccagggctggcactctgtcgataccccaccgagaccccattgggaccaatacgcccgcgtttcttccttttccccaccccaacccccaagttcgggtgaaggcccagggctcgcagccaacgtcggggcggcaagccctgccatagccactacgggtacgtttaaaccagataacttcgtataatgtatgctatacgaagttatggtaccgcggccgcgtagaggatctgttgatcagcagttcaacctgttgatagtacaaacaaagctgtagccaaccactagaactatagctagagtcctgggcgaacaaacgatgctcgccttccagaaaaccgaggatgcgaaccacttcatccggggtcagcaccaccggcaagcgccgcgacggccgaggtctaccgatctcctgaagcaagggcagatccgtgcacagcaccttgccgtagaagaacagcaaggccgccaatgcctgacgatgcgtggagaccgaaaccttgcgctcgttcgccagccaggacagaaatgcctcgacttcgctgctgcccaaggttgccgggtgacgcacaccgtggaaacggatgaaggcacgaacccagttgacataagcctgttcggttcgtaaactgtaatgcaagtagcgtatgcgctcacgcaactggtccagaaccttgaccgaacgcagcggtggtaacggcgcagtggcggttttcatggcttgttatgactgtttttttgtacagtctatgcctcgggcatccaagcagcaagcgcgttacgccgtgggtcgatgtttgatgttatggagcagcaacgatgttacgcagcagcaacgatgttacgcagcagggcagtcgccctaaaacaaagttaggtggctcaagtatgggcatcattcgcacatgtaggctcggccctgaccaagtcaaatccatgcgggctgctcttgatcttttcggtcgtgagttcggagacgtagccacctactcccaacatcagccggactccgattacctcgggaacttgctccgtagtaagacattcatcgcgcttgctgccttcgaccaagaagcggttgttggcgctctcgcggcttacgttctgcccaagtttgagcagccgcgtagtgagatctatatctatgatctcgcagtctccggcgagcaccggaggcagggcattgccaccgcgctcatcaatctcctcaagcatgaggccaacgcgcttggtgcttatgtgatctacgtgcaagcagattacggtgacgatcccgcagtggctctctatacaaagttgggcatacgggaagaagtgatgcactttgatatcgacccaagtaccgccacctaacaattcgttcaagccgagatcggcttcccggccgcggagttgttcggtaaattgtcacaacgccgcgaatatagtctttaccatgcccttggccacgcccctctttaatacgacgggcaatttgcacttcagaaaatgaagagtttgctttagccataacaaaagtccagtatgctttttcacagcataactggactgatttcagtttacaactattctgtctagtttaagactttattgtcatagtttagatctattttgttcagtttaagactttattgtccgcccacacccgcttacgcagggcatccatttattactcaaccgtaaccgattttgccaggttacgcggctggtctatgcactggccgtcgttttacaacgtcgtgactgggaaaaccctggcgttacccaacttaatcgccttgcagcacatccccctttcgccagctggcgtaatagcgaagaggcccgcaccgatcgcccttcccaacagttgcgcagcctgaatggcgaatggcgcgacgcgccctgtagcggcgcattaagcgcggcgggtgtggtggttacgcgcagcgtgaccgctacacttgccagcgccctagcgcccgctcctttcgctttcttcccttcctttctcgccacgttcgccggctttccccgtcaagctctaaatcgggggctccctttagggttccgatttagtgctttacggcacctcgaccccaaaaaacttgattagggtgatggttcacgtagtgggccatcgccctgatagacggtttttcgccctttgacgttggagtccacgttctttaatagtggactcttgttccaaactggaacaa

SEQ ID NO: 23 - DNA, 11503 bp, Artificial Sequence
  Synthetic construct
ttgttccagtttggaacaagagtccactattaaagaacgtggactccaacgtcaaagggcgaaaaaccgtctatcagggcgatggcccactacgtgaaccatcaccctaatcaagttttttggggtcgaggtgccgtaaagcactaaatcggaaccctaaagggagcccccgatttagagcttgacggggaaagccggcgaacgtggcgagaaaggaagggaagaaagcgaaaggagcgggcgctagggcgctggcaagtgtagcggtcacgctgcgcgtaaccaccacacccgccgcgcttaatgcgccgctacagggcgcgtccattcgccattcaggctgcgcaactgttgggaagggcgatcggtgcgggcctcttcgctattacgccagctggcgaaagggggatgtgctgcaaggcgattaagttgggtaacgccagggttttcccagtcacgacgttgtaaaacgacggccagtgcatagaccagccgcgtaacctggcaaaatcggttacggttgagtaataaatggatgccctgcgtaagcgggtgtgggcggacaataaagtcttaaactgaacaaaatagatctaaactatgacaataaagtcttaaactagacagaatagttgtaaactgaaatcagtccagttatgctgtgaaaaagcatactggacttttgttatggctaaagcaaactcttcattttctgaagtgcaaattgcccgtcgtattaaagaggggcgtggccaagggcatggtaaagactatattcgcggcgttgtgacaatttaccgaacaactccgcggccgggaagccgatctcggcttgaacgaattgttaggtggcggtacttgggtcgatatcaaagtgcatcacttcttcccgtatgcccaactttgtatagagagccactgcgggatcgtcaccgtaatctgcttgcacgtagatcacataagcaccaagcgcgttggcctcatgcttgaggagattgatgagcgcggtggcaatgccctgcctccggtgctcgccggagactgcgagatcatagatatagatctcactacgcggctgctcaaacttgggcagaacgtaagccgcgagagcgccaacaaccgcttcttggtcgaaggcagcaagcgcgatgaatgtcttactacggagcaagttcccgaggtaatcggagtccggctgatgttgggagtaggtggctacgtctccgaactcacgaccgaaaagatcaagagcagcccgcatggatttgacttggtcagggccgagcctacatgtgcgaatgatgcccatacttgagccacctaactttgttttagggcgactgccctgctgcgtaacatcgttgctgctgcgtaacatcgttgctgctccataacatcaaacatcgacccacggcgtaacgcgcttgctgcttggatgcccgaggcatagactgtacaaaaaaacagtcataacaagccatgaaaaccgccactgcgccgttaccaccgctgcgttcggtcaaggttctggaccagttgcgtgagcgcatacgctacttgcattacagtttacgaaccgaacaggcttatgtcaactgggtttgtgccttcatccgtttccacggtgtgcgtcacccggcaaccttgggcagcagcgaagtcgaggcatttctgtcctggctggcgaacgagcgcaaggtttcggtctccacgcatcgtcaggcattggcggccttgctgttcttctacggcaaggtgctgtgcacggatctgcccttgcttcaggagatcggtagacctcggccgtcgcggcgcttgccggtggtgctgaccccggatgaagtggttcgcatcctcggttttctggaaggcgagcatcgtttgttcgcccaggactctagctatagttctagtggttggctacagctttgtttgtactatcaacaggttgaactgctgatcaacagatcctctacgcggccgcggtaccataacttcgtatagcatacattatacgaagttatctggttttactagtatcgattcgcgacctactccggaatattaatagatcatggagataattaaaatgataaccatctcgcaaataaataagtattttactgttttcgtaacagttttgtaataaaaaaacctataaatattccggattattcataccgtcccaccatcgggcgcggatccgccaccatgcgtcccggcctgccctcctacctgatcgtgctggctgtgtgcctgctgtcccacctcctgtcctcccgttacggtgctgaggctatctccgagcccctggacaaggctttccacctcctgctgaacacctacggtcgtcctatccgtttcctgcgcgagaacaccacccagtgcacctacaactcctccctgcgcaactccaccgtcgtccgcgagaacgctatctccttcaacttcttccagtcctacaaccagtactacgtgttccacatgccccgttgcctgttcgctggtcccctggctgagcagttcctgaaccaggtggacctgaccgagactctcgagcgttaccagcagcgtctgaacacttacgctctggtgtccaaggacctggcttcctaccgttccttcagccagcagctgaaggctcaggactccctgggcgagcagcccaccactgtgcctccccctatcgacctgtccatcccccacgtgtggatgcccccccagaccactcctcacggctggaccgagtcccacaccacctccggactgcaccgtccccacttcaaccagacctgcatcctgttcgacggtcacgacctgctgttctccaccgtgaccccctgcctgcaccagggcttctacctcatcgacgagctgcgttacgtgaagatcaccctgaccgaggatttcttcgtggtcaccgtgtccatcgacgacgacacccccatgctgctgatcttcggtcacctcccccgtgtgctgttcaaggctccctaccagcgtgacaacttcatcctgcgtcagaccgagaagcacgagctgctggtgctggtcaagaaggaccagctgaaccgtcactcttacctgaaggaccccgacttcctggacgctgctctggacttcaactacctggacctgtccgctctgctgaggaactccttccaccgttacgctgtggacgtgctgaagtccggtcgttgccagatgctggaccgtcgtaccgtcgagatggctttcgcttacgccctggctctgttcgctgctgctcgtcaagaagaggctggcgctcaggtgtccgtgccccgtgctctggaccgtcaggctgctctgctgcagatccaagagttcatgatcacttgcctgtcccagaccccccctcgtaccaccctgctgctgtaccccaccgctgtggacctggctaagcgtgctctgtggacccccaaccagatcaccgacatcacctccctcgtgcgtctggtgtacatcctgtccaagcagaaccagcagcacctgatcccccagtgggctctgcgtcagatcgctgacttcgctctgaagctgcacaagacccacctggcttcattcctcagcgctttcgctcgccaagagctgtacctgatgggttccctggtgcactccatgctggtgcacaccaccgagcgtcgcgagatcttcatcgtggaaaccggcctgtgctccctggccgagctgtcccacttcacccagctgctggctcacccccaccacgagtacctgtccgacctgtacaccccctgctcctcttccggtcgtcgtgaccactccctggaacgtctgacccgtctgttccccgacgctaccgtgcctaccaccgtgcctgctgctctgtccatcctgtctaccatgcagccctccaccctggaaaccttccccgacctgttctgcctgcctctgggcgagtccttctccgctctgaccgtgtccgagcacgtgtcctacgtggtcaccaaccagtacctgatcaagggcatctcctaccccgtgtccaccaccgtcgtgggccagtccctgatcatcacccagaccgactcccagaccaagtgcgagctgacccgtaacatgcacaccactcactccatcaccgctgctctgaacatctccctcgagaactgcgctttctgccagtccgctctgttggagtacgacgacactcagggtgtcatcaacatcatgtacatgcacgactccgacgacgtgctgttcgctctggacccctacaacgaggtggtggtgtcctccccccgtacccactacctgatgctgctgaagaacggcaccgtgctggaagtgaccgacgtggtggtggacgctaccgaccgtctgctgatgatgtccgtgtacgctctgtccgctatcatcggcatctacctgctgtaccgtatgctgaagacctgcggttcctccggtggcgccggtggctccggttcctctggcggttctggttcctccgctcaacttgagaaagaactgcaggctctcgaaaaagaaaacgcccaactcgaatgggagctgcaagccttggaaaaagaactggcccaattggaaaaagaaaaccaggctttggaatgggagctggctcagtaaggcgccaagctttgtcgagaagtactagaggatcataatcagccataccacatttgtagaggttttacttgctttaaaaaacctcccacacctccccctgaacctgaaacataaaatgaatgcaattgttgttgttaacttgtttattgcagcttataatggttacaaataaagcaatagcatcacaaatttcacaaataaagcatttttttcactgcattctagttgtggtttgtccaaactcatcaatgtatcttatcatgtctggatctgatcactgcttgagcctagaagatccggctgctaacaaagcccgaaaggaagctgagttggctgctgccaccgctgagcaataactatcataacccctaggggcctctaaacgggtcttgaggggttttttgctgaaaggaggaactatatccggatctgaacaggagggacagctgatagaaacagaagccactggagcacctcaaaaacaccatcatacactaaatcagtaagttggcagcatcacccgacgcactttgcgccgaataaatacctgtgacggaagatcacttcgcagaataaataaatcctggtgtccctgttgataccgggaagccctgggccaacttttggcgaaaatgagacgttgatcggcacgtaagaggttccaactttcaccataatgaaataagatcactaccgggcgtattttttgagttatcgagattttcaggagctaaggaagctaaaatggagaaaaaaatcactggatataccaccgttgatatatcccaatggcatcgtaaagaacattttgaggcatttcagtcagttgctcaatgtacctataaccagaccgttcagctggatattacggcctttttaaagaccgtaaagaaaaataagcacaagttttatccggcctttattcacattcttgcccgcctgatgaatgctcatccggaattccgtatggcaatgaaagacggtgagctggtgatatgggatagtgttcacccttgttacaccgttttccatgagcaaactgaaacgttttcatcgctctggagtgaataccacgacgatttccggcagtttctacacatatattcgcaagatgtggcgtgttacggtgaaaacctggcctatttccctaaagggtttattgagaatatgtttttcgtctcagccaatccctgggtgagtttcaccagttttgatttaaacgtggccaatatggacaacttcttcgcccccgttttcaccatgggcaaatattatacgcaaggcgacaaggtgctgatgccgctggcgattcaggttcatcatgccgtttgtgatggcttccatgtcggcagaatgcttaatgaattacaacagtactgcgatgagtggcagggcggggcgtaatttttttaaggcagttattggtgcccttaaacgcctggttgctacgcctgaataagtgataataagcggatgaatggcagaaattcgaaagcaaattcgacccggtcgtcggttcagggcagggtcgttaaatagccgcttatgtctattgctggtttaccggtttattgactaccggaagcagtgtgaccgtgtgcttctcaaatgcctgaggccagtttgctcaggctctccccgtggaggtaataattgacgatatgatcatttattctgcctcccagctgacattcatccggggtcagcaccgtttctgcggactggctttctacgtgttccgcttcctttagcagcccttgcgccctgagtgcttgcggcagcgtgaagctaattctgtcagccgttaagtgttcctgtgtcactcaaaattgctttgagaggctctaagggcttctcagtgcgttacatccctggcttgttgtccacaaccgttaaaccttaaaagctttaaaagccttatatattcttttttttcttataaaacttaaaaccttagaggctatttaagttgctgatttatattaattttattgttcaaacatgagagcttagtacgtgaaacatgagagcttagtacgttagccatgagagcttagtacgttagccatgagggtttagttcgttaaacatgagagcttagtacgttaaacatgagagcttagtacgtgaaacatgagagcttagtacgtactatcaacaggttgaactgctgatcaacagatcctctacgcggccgcggtaccataacttcgtatagcatacattatacgaagttatctggtttaaacgtacccgtagtggctatggcagggcttgccgccccgacgttggctgcgagccctgggccttcacccgaacttgggggttggggtggggaaaaggaagaaacgcgggcgtattggtcccaatggggtctcggtggggtatcgacagagtgccagccctgggaccgaaccccgcgtttatgaacaaacgacccaacacccgtgcgttttattctgtctttttattgccgtcatagcgcgggttccttccggtattgtctccttccgtgtttcagttagcctcccccatctcccggtaccgcatgctatgcatcagctgctagcttagcgagcgtccacagcctggggaccgtaacgggagtgagcgggcaggttcacacgggtctgcttcagctcagggggcaggccagcgtagtacttgtccaggtgacgcagcaggggggggtccagctggtgacgcaggcagaattccttcacagcgttgtacaggccgtagaacagggtgataccctcgggagcagcagcggtggacacgggcagacgcacagcacggttggtacgggtagcctcgttacggatagccaccaccacgttgaacagggaggggggcaccagctcgaaacccagcacgtgttcggtgaagatggaacgaccgtaggacagacgagtcaggtcgtaaccacggcacaggtcgtccacgcaagtgtacacagcgggggaaccgtcgccgcactcggagtaaccgcgcatcacggtcatccaacggggagcggtgtcggaggacagcagggtcagcagagcacgcagctggtcggggttgttgtacagcagggccagggtgtccaggaaagcgtcgtccagcagcacggagttagcagcctcgggggtcacgggacggtaacggatcagctgggacaggggaccgtccctacgggtcacgttgaccaggggacgcagccaggactcgtacttgtcgccctggaacacctctcccagcaggcaacgacgggtcagctcggggcactcagcgggcaccttctcagccacggtgggagccacggacacggtagcggaggacacgatgggcagcagcaggcagcaccacagcagagccacgggaccgggggagaaggagaaaccgcagtcgggacgacggcacatggtggctcgagatcccgggtgatcaagtcttcgtcgagtgattgtaaataaaatgtaatttacagtatagtattttaattaatatacaaatgatttgataataattcttatttaactataatatattgtgttgggttgaattaaaggtccgtatactagtatcgattcgcgacctactccggaatattaatagatcatggagataattaaaatgataaccatctcgcaaataaataagtattttactgttttcgtaacagttttgtaataaaaaaacctataaatattccggattattcataccgtcccaccatcgggcgcggatccgccaccatgtcccccaagaacctgacccccttcctgaccgctctgtggctgctgctgggccactcccgtgtgcctcgtgtgcgtgctgaggaatgctgcgagttcatcaacgtgaaccacccccccgagcgctgctacgacttcaagatgtgcaaccgtttcaccgtggctctgcgttgccccgacggcgaagtgtgctactcccccgaaaagaccgctgagatccgtggtatcgtgaccaccatgacccactccctgacccgtcaggtggtgcacaacaagctgacctcttgcaactacaaccccctgtacctcgaggctgacggtcgtatccgttgcggcaaggtcaacgacaaggctcagtacctgctgggtgctgctggttccgtgccctaccgttggatcaacctcgagtacgacaagatcacccgtatcgtgggcctggaccagtacctcgagtccgtgaagaagcacaagcgtctggacgtgtgccgtgctaagatgggttacatgctgcagtaaaagcttgtcgagaagtactagaggatcataatcagccataccacatttgtagaggttttacttgctttaaaaaacctcccacacctccccctgaacctgaaacataaaatgaatgcaattgttgttgttaacttgtttattgcagcttataatggttacaaataaagcaatagcatcacaaatttcacaaataaagcatttttttcactgcattctagttgtggtttgtccaaactcatcaatgtatcttatcatgtctggatctgatcactgcttgagcctagaagatccggctgctaacaaagcccgaaaggaagctgagttggctgctgtggctagctttgtttaactttaagaaggagatacatctagaccggaatattaatagatcatggagataattaaaatgataaccatctcgcaaataaataagtattttactgttttcgtaacagttttgtaataaaaaaacctataaatattccggattattcataccgtcccaccatcgggcgcggatccgccaccatgctgcgtctgctgctgcgtcaccacttccactgcctgctgctgtgcgctgtgtgggctaccccctgcctggcttccccttggtccaccctgaccgctaaccagaacccctccccaccctggtccaagctgacctactccaagccccacgacgctgctaccttctactgccccttcctgtacccatccccccctcgttccccactgcagttctccggtttccagcgtgtgctgaccggtcccgagtgccgtaacgagactctgtacctgctgtacaaccgcgagggccagaccctggtcgagaggtcctccacctgggtcaagaaggtcatctggtacttgtccggtcgtaaccagaccatcctgcagcgtatgccccgtaccgcttccaagccctccgacggcaacgtgcagatctccgtcgaggacgctaagatcttcggtgctcacatggtgcccaagcagaccaagctgctgcgtttcgtggtcaacgacggcacccgttaccagatgtgcgtgatgaagctcgagtcctgggctcacgtgttccgtgactactccgtgtccttccaagtgcgcctgaccttcaccgaggctaacaaccagacctacaccttctgcacccaccccaacctgatcgtgtaaaagcttgtcgagaagtactagaggatcataatcagccataccacatttgtagaggttttacttgctttaaaaaacctcccacacctccccctgaacctgaaacataaaatgaatgcaattgttgttgttaacttgtttattgcagcttataatggttacaaataaagcaatagcatcacaaatttcacaaataaagcatttttttcactgcattctagttgtggtttgtccaaactcatcaatgtatcttatcatgtctggatctgatcactgcttgagcctagaagatccggctgctaacaaagcccgaaaggaagctgagttggctgctgggtgcctaatgagtgagctaactcacattaattgcccggaatattaatagatcatggagataattaaaatgataaccatctcgcaaataaataagtattttactgttttcgtaacagttttgtaataaaaaaacctataaatattccggattattcataccgtcccaccatcgggcgcggatccgccaccatgcgtctgtgccgtgtgtggctgtccgtgtgcctgtgcgctgtggtgctgggccagtgccagcgtgaaaccgctgagaagaacgactactaccgtgtgccccactactgggacgcttgctcccgtgctctgcccgaccagacccgttacaagtacgtcgagcagctggtggacctgaccctgaactaccactacgacgcttcccacggcctggacaacttcgacgtgctgaagcgtatcaacgtgaccgaggtgtccctgctgatctccgacttccgtcgtcagaaccgtcgtggtggcaccaacaagcgtaccaccttcaacgctgctggttccctggctccccacgctcgttccctcgagttctccgtgcgtctgttcgctaactaaaagcttgtcgagaagtactagaggatcataatcagccataccacatttgtagaggttttacttgctttaaaaaacctcccacacctccccctgaacctgaaacataaaatgaatgcaattgttgttgttaacttgtttattgcagcttataatggttacaaataaagcaatagcatcacaaatttcacaaataaagcatttttttcactgcattctagttgtggtttgtccaaactcatcaatgtatcttatcatgtctggatctgatcactgcttgagcctagaagatccggctgctaacaaagcccgaaaggaagctgagttggctgctgccaccgctgagcaataactatcataacccctaggagatccgaaccagataagtgaaatctagttccaaactattttgtcatttttaattttcgtattagcttacgacgctacacccagttcccatctattttgtcactcttccctaaataatccttaaaaactccatttccacccctcccagttcccaactattttgtccgcccaca

SEQ ID NO: 24 - DNA, 11503 bp, Artificial Sequence
  Synthetic construct
ttgttccagtttggaacaagagtccactattaaagaacgtggactccaacgtcaaagggcgaaaaaccgtctatcagggcgatggcccactacgtgaaccatcaccctaatcaagttttttggggtcgaggtgccgtaaagcactaaatcggaaccctaaagggagcccccgatttagagcttgacggggaaagccggcgaacgtggcgagaaaggaagggaagaaagcgaaaggagcgggcgctagggcgctggcaagtgtagcggtcacgctgcgcgtaaccaccacacccgccgcgcttaatgcgccgctacagggcgcgtccattcgccattcaggctgcgcaactgttgggaagggcgatcggtgcgggcctcttcgctattacgccagctggcgaaagggggatgtgctgcaaggcgattaagttgggtaacgccagggttttcccagtcacgacgttgtaaaacgacggccagtgcatagaccagccgcgtaacctggcaaaatcggttacggttgagtaataaatggatgccctgcgtaagcgggtgtgggcggacaataaagtcttaaactgaacaaaatagatctaaactatgacaataaagtcttaaactagacagaatagttgtaaactgaaatcagtccagttatgctgtgaaaaagcatactggacttttgttatggctaaagcaaactcttcattttctgaagtgcaaattgcccgtcgtattaaagaggggcgtggccaagggcatggtaaagactatattcgcggcgttgtgacaatttaccgaacaactccgcggccgggaagccgatctcggcttgaacgaattgttaggtggcggtacttgggtcgatatcaaagtgcatcacttcttcccgtatgcccaactttgtatagagagccactgcgggatcgtcaccgtaatctgcttgcacgtagatcacataagcaccaagcgcgttggcctcatgcttgaggagattgatgagcgcggtggcaatgccctgcctccggtgctcgccggagactgcgagatcatagatatagatctcactacgcggctgctcaaacttgggcagaacgtaagccgcgagagcgccaacaaccgcttcttggtcgaaggcagcaagcgcgatgaatgtcttactacggagcaagttcccgaggtaatcggagtccggctgatgttgggagtaggtggctacgtctccgaactcacgaccgaaaagatcaagagcagcccgcatggatttgacttggtcagggccgagcctacatgtgcgaatgatgcccatacttgagccacctaactttgttttagggcgactgccctgctgcgtaacatcgttgctgctgcgtaacatcgttgctgctccataacatcaaacatcgacccacggcgtaacgcgcttgctgcttggatgcccgaggcatagactgtacaaaaaaacagtcataacaagccatgaaaaccgccactgcgccgttaccaccgctgcgttcggtcaaggttctggaccagttgcgtgagcgcatacgctacttgcattacagtttacgaaccgaacaggcttatgtcaactgggtttgtgccttcatccgtttccacggtgtgcgtcacccggcaaccttgggcagcagcgaagtcgaggcatttctgtcctggctggcgaacgagcgcaaggtttcggtctccacgcatcgtcaggcattggcggccttgctgttcttctacggcaaggtgctgtgcacggatctgcccttgcttcaggagatcggtagacctcggccgtcgcggcgcttgccggtggtgctgaccccggatgaagtggttcgcatcctcggttttctggaaggcgagcatcgtttgttcgcccaggactctagctatagttctagtggttggctacagctttgtttgtactatcaacaggttgaactgctgatcaacagatcctctacgcggccgcggtaccataacttcgtatagcatacattatacgaagttatctggttttactagtatcgattcgcgacctactccggaatattaatagatcatggagataattaaaatgataaccatctcgcaaataaataagtattttactgttttcgtaacagttttgtaataaaaaaacctataaatattccggattattcataccgtcccaccatcgggcgcggatccgccaccatgcgtcccggcctgccctcctacctgatcgtgctggctgtgtgcctgctgtcccacctcctgtcctcccgttacggtgctgaggctatctccgagcccctggacaaggctttccacctcctgctgaacacctacggtcgtcctatccgtttcctgcgcgagaacaccacccagtgcacctacaactcctccctgcgcaactccaccgtcgtccgcgagaacgctatctccttcaacttcttccagtcctacaaccagtactacgtgttccacatgccccgttgcctgttcgctggtcccctggctgagcagttcctgaaccaggtggacctgaccgagactctcgagcgttaccagcagcgtctgaacacttacgctctggtgtccaaggacctggcttcctaccgttccttcagccagcagctgaaggctcaggactccctgggcgagcagcccaccactgtgcctccccctatcgacctgtccatcccccacgtgtggatgcccccccagaccactcctcacggctggaccgagtcccacaccacctccggactgcaccgtccccacttcaaccagacctgcatcctgttcgacggtcacgacctgctgttctccaccgtgaccccctgcctgcaccagggcttctacctcatcgacgagctgcgttacgtgaagatcaccctgaccgaggatttcttcgtggtcaccgtgtccatcgacgacgacacccccatgctgctgatcttcggtcacctcccccgtgtgctgttcaaggctccctaccagcgtgacaacttcatcctgcgtcagaccgagaagcacgagctgctggtgctggtcaagaaggaccagctgaaccgtcactcttacctgaaggaccccgacttcctggacgctgctctggacttcaactacctggacctgtccgctctgctgaggaactccttccaccgttacgctgtggacgtgctgaagtccggtcgttgccagatgctggaccgtcgtaccgtcgagatggctttcgcttacgccctggctctgttcgctgctgctcgtcaagaagaggctggcgctcaggtgtccgtgccccgtgctctggaccgtcaggctgctctgctgcagatccaagagttcatgatcacttgcctgtcccagaccccccctcgtaccaccctgctgctgtaccccaccgctgtggacctggctaagcgtgctctgtggacccccaaccagatcaccgacatcacctccctcgtgcgtctggtgtacatcctgtccaagcagaaccagcagcacctgatcccccagtgggctctgcgtcagatcgctgacttcgctctgaagctgcacaagacccacctggcttcattcctcagcgctttcgctcgccaagagctgtacctgatgggttccctggtgcactccatgctggtgcacaccaccgagcgtcgcgagatcttcatcgtggaaaccggcctgtgctccctggccgagctgtcccacttcacccagctgctggctcacccccaccacgagtacctgtccgacctgtacaccccctgctcctcttccggtcgtcgtgaccactccctggaacgtctgacccgtctgttccccgacgctaccgtgcctaccaccgtgcctgctgctctgtccatcctgtctaccatgcagccctccaccctggaaaccttccccgacctgttctgcctgcctctgggcgagtccttctccgctctgaccgtgtccgagcacgtgtcctacgtggtcaccaaccagtacctgatcaagggcatctcctaccccgtgtccaccaccgtcgtgggccagtccctgatcatcacccagaccgactcccagaccaagtgcgagctgacccgtaacatgcacaccactcactccatcaccgctgctctgaacatctccctcgagaactgcgctttctgccagtccgctctgttggagtacgacgacactcagggtgtcatcaacatcatgtacatgcacgactccgacgacgtgctgttcgctctggacccctacaacgaggtggtggtgtcctccccccgtacccactacctgatgctgctgaagaacggcaccgtgctggaagtgaccgacgtggtggtggacgctaccgaccgtctgctgatgatgtccgtgtacgctctgtccgctatcatcggcatctacctgctgtaccgtatgctgaagacctgcggttcctccggtggcgccggtggctccggttcctctggcggttctggttcctccgctcaacttgagaaagaactgcaggctctcgaaaaagaaaacgcccaactcgaatgggagctgcaagccttggaaaaagaactggcccaattggaaaaagaaaaccaggctttggaatgggagctggctcagtaaggcgccaagctttgtcgagaagtactagaggatcataatcagccataccacatttgtagaggttttacttgctttaaaaaacctcccacacctccccctgaacctgaaacataaaatgaatgcaattgttgttgttaacttgtttattgcagcttataatggttacaaataaagcaatagcatcacaaatttcacaaataaagcatttttttcactgcattctagttgtggtttgtccaaactcatcaatgtatcttatcatgtctggatctgatcactgcttgagcctagaagatccggctgctaacaaagcccgaaaggaagctgagttggctgctgccaccgctgagcaataactatcataacccctaggggcctctaaacgggtcttgaggggttttttgctgaaaggaggaactatatccggatctgaacaggagggacagctgatagaaacagaagccactggagcacctcaaaaacaccatcatacactaaatcagtaagttggcagcatcacccgacgcactttgcgccgaataaatacctgtgacggaagatcacttcgcagaataaataaatcctggtgtccctgttgataccgggaagccctgggccaacttttggcgaaaatgagacgttgatcggcacgtaagaggttccaactttcaccataatgaaataagatcactaccgggcgtattttttgagttatcgagattttcaggagctaaggaagctaaaatggagaaaaaaatcactggatataccaccgttgatatatcccaatggcatcgtaaagaacattttgaggcatttcagtcagttgctcaatgtacctataaccagaccgttcagctggatattacggcctttttaaagaccgtaaagaaaaataagcacaagttttatccggcctttattcacattcttgcccgcctgatgaatgctcatccggaattccgtatggcaatgaaagacggtgagctggtgatatgggatagtgttcacccttgttacaccgttttccatgagcaaactgaaacgttttcatcgctctggagtgaataccacgacgatttccggcagtttctacacatatattcgcaagatgtggcgtgttacggtgaaaacctggcctatttccctaaagggtttattgagaatatgtttttcgtctcagccaatccctgggtgagtttcaccagttttgatttaaacgtggccaatatggacaacttcttcgcccccgttttcaccatgggcaaatattatacgcaaggcgacaaggtgctgatgccgctggcgattcaggttcatcatgccgtttgtgatggcttccatgtcggcagaatgcttaatgaattacaacagtactgcgatgagtggcagggcggggcgtaatttttttaaggcagttattggtgcccttaaacgcctggttgctacgcctgaataagtgataataagcggatgaatggcagaaattcgaaagcaaattcgacccggtcgtcggttcagggcagggtcgttaaatagccgcttatgtctattgctggtttaccggtttattgactaccggaagcagtgtgaccgtgtgcttctcaaatgcctgaggccagtttgctcaggctctccccgtggaggtaataattgacgatatgatcatttattctgcctcccagctgacattcatccggggtcagcaccgtttctgcggactggctttctacgtgttccgcttcctttagcagcccttgcgccctgagtgcttgcggcagcgtgaagctaattctgtcagccgttaagtgttcctgtgtcactcaaaattgctttgagaggctctaagggcttctcagtgcgttacatccctggcttgttgtccacaaccgttaaaccttaaaagctttaaaagccttatatattcttttttttcttataaaacttaaaaccttagaggctatttaagttgctgatttatattaattttattgttcaaacatgagagcttagtacgtgaaacatgagagcttagtacgttagccatgagagcttagtacgttagccatgagggtttagttcgttaaacatgagagcttagtacgttaaacatgagagcttagtacgtgaaacatgagagcttagtacgtactatcaacaggttgaactgctgatcaacagatcctctacgcggccgcggtaccataacttcgtatagcatacattatacgaagttatctggtttaaacgtacccgtagtggctatggcagggcttgccgccccgacgttggctgcgagccctgggccttcacccgaacttgggggttggggtggggaaaaggaagaaacgcgggcgtattggtcccaatggggtctcggtggggtatcgacagagtgccagccctgggaccgaaccccgcgtttatgaacaaacgacccaacacccgtgcgttttattctgtctttttattgccgtcatagcgcgggttccttccggtattgtctccttccgtgtttcagttagcctcccccatctcccggtaccgcatgctatgcatcagctgctagcttagcgagcgtccacagcctggggaccgtaacgggagtgagcgggcaggttcacacgggtctgcttcagctcagggggcaggccagcgtagtacttgtccaggtgacgcagcaggggggggtccagctggtgacgcaggcagaattccttcacagcgttgtacaggccgtagaacagggtgataccctcgggagcagcagcggtggacacgggcagacgcacagcacggttggtacgggtagcctcgttacggatagccaccaccacgttgaacagggaggggggcaccagctcgaaacccagcacgtgttcggtgaagatggaacgaccgtaggacagacgagtcaggtcgtaaccacggcacaggtcgtccacgcaagtgtacacagcgggggaaccgtcgccgcactcggagtaaccgcgcatcacggtcatccaacggggagcggtgtcggaggacagcagggtcagcagagcacgcagctggtcggggttgttgtacagcagggccagggtgtccaggaaagcgtcgtccagcagcacggagttagcagcctcgggggtcacgggacggtaacggatcagctgggacaggggaccgtccctacgggtcacgttgaccaggggacgcagccaggactcgtacttgtcgccctggaacacctctcccagcaggcaacgacgggtcagctcggggcactcagcgggcaccttctcagccacggtgggagccacggacacggtagcggaggacacgatgggcagcagcaggcagcaccacagcagagccacgggaccgggggagaaggagaaaccgcagtcgggacgacggcacatggtggctcgagatcccgggtgatcaagtcttcgtcgagtgattgtaaataaaatgtaatttacagtatagtattttaattaatatacaaatgatttgataataattcttatttaactataatatattgtgttgggttgaattaaaggtccgtatactagtatcgattcgcgacctactccggaatattaatagatcatggagataattaaaatgataaccatctcgcaaataaataagtattttactgttttcgtaacagttttgtaataaaaaaacctataaatattccggattattcataccgtcccaccatcgggcgcggatccgccaccatgaactccaaggacctgacccccttcctgaccaccctgtggctgctgctggaccactcccgtgtgcctcgtgtgcgtgctgaggaatgctgcgaagtgatcaacgtgaaccacccccccgagcgctgctacgacttcaagatgtgcaacctgttcaccgtggctctgcgttgccccgacggcgaagtgtgctactcccccgaaaagaccgctgagatccgtggtatcgtgaccaccatgacccactccctgacccgtcaagtgatccacaacaagctgaccagctgcaactacaaccccctgtacctcgaggctgacggtcgtatccgttgcggcaaggtgtccgacaaggctcagtacctgctgggtgctgctggttccgtgccctaccgttggatcaacctcgagtacgacaagatcacccgtatcgtgggcctggaccagtacctcgagtccgtgaagaagcacaagcgtctggacgtgtgccgtgctaagatgggttacatgctgcagtaaaagcttgtcgagaagtactagaggatcataatcagccataccacatttgtagaggttttacttgctttaaaaaacctcccacacctccccctgaacctgaaacataaaatgaatgcaattgttgttgttaacttgtttattgcagcttataatggttacaaataaagcaatagcatcacaaatttcacaaataaagcatttttttcactgcattctagttgtggtttgtccaaactcatcaatgtatcttatcatgtctggatctgatcactgcttgagcctagaagatccggctgctaacaaagcccgaaaggaagctgagttggctgctgtggctagctttgtttaactttaagaaggagatacatctagaccggaatattaatagatcatggagataattaaaatgataaccatctcgcaaataaataagtattttactgttttcgtaacagttttgtaataaaaaaacctataaatattccggattattcataccgtcccaccatcgggcgcggatccgccaccatgctgcgtctgctgctgcgtcaccacttccactgcctgctgctgtgcgctgtgtgggctaccccctgcctggcttccccttggtccaccctgaccgctaaccagaacccctccccaccctggtccaagctgacctactccaagccccacgacgctgctaccttctactgccccttcctgtacccatccccccctcgttccccactgcagttctccggtttccagcgtgtgctgaccggtcccgagtgccgtaacgagactctgtacctgctgtacaaccgcgagggccagaccctggtcgagaggtcctccacctgggtcaagaaggtcatctggtacttgtccggtcgtaaccagaccatcctgcagcgtatgccccgtaccgcttccaagccctccgacggcaacgtgcagatctccgtcgaggacgctaagatcttcggtgctcacatggtgcccaagcagaccaagctgctgcgtttcgtggtcaacgacggcacccgttaccagatgtgcgtgatgaagctcgagtcctgggctcacgtgttccgtgactactccgtgtccttccaagtgcgcctgaccttcaccgaggctaacaaccagacctacaccttctgcacccaccccaacctgatcgtgtaaaagcttgtcgagaagtactagaggatcataatcagccataccacatttgtagaggttttacttgctttaaaaaacctcccacacctccccctgaacctgaaacataaaatgaatgcaattgttgttgttaacttgtttattgcagcttataatggttacaaataaagcaatagcatcacaaatttcacaaataaagcatttttttcactgcattctagttgtggtttgtccaaactcatcaatgtatcttatcatgtctggatctgatcactgcttgagcctagaagatccggctgctaacaaagcccgaaaggaagctgagttggctgctgggtgcctaatgagtgagctaactcacattaattgcccggaatattaatagatcatggagataattaaaatgataaccatctcgcaaataaataagtattttactgttttcgtaacagttttgtaataaaaaaacctataaatattccggattattcataccgtcccaccatcgggcgcggatccgccaccatgcgtctgtgccgtgtgtggctgtccgtgtgcctgtgcgctgtggtgctgggccagtgccagcgtgaaaccgctgagaagaacgactactaccgtgtgccccactactgggacgcttgctcccgtgctctgcccgaccagacccgttacaagtacgtcgagcagctggtggacctgaccctgaactaccactacgacgcttcccacggcctggacaacttcgacgtgctgaagcgtatcaacgtgaccgaggtgtccctgctgatctccgacttccgtcgtcagaaccgtcgtggtggcaccaacaagcgtaccaccttcaacgctgctggttccctggctccccacgctcgttccctcgagttctccgtgcgtctgttcgctaactaaaagcttgtcgagaagtactagaggatcataatcagccataccacatttgtagaggttttacttgctttaaaaaacctcccacacctccccctgaacctgaaacataaaatgaatgcaattgttgttgttaacttgtttattgcagcttataatggttacaaataaagcaatagcatcacaaatttcacaaataaagcatttttttcactgcattctagttgtggtttgtccaaactcatcaatgtatcttatcatgtctggatctgatcactgcttgagcctagaagatccggctgctaacaaagcccgaaaggaagctgagttggctgctgccaccgctgagcaataactatcataacccctaggagatccgaaccagataagtgaaatctagttccaaactattttgtcatttttaattttcgtattagcttacgacgctacacccagttcccatctattttgtcactcttccctaaataatccttaaaaactccatttccacccctcccagttcccaactattttgtccgcccaca

SEQ ID NO: 25 - DNA, 11619 bp, Artificial Sequence
  Synthetic construct
ttgttccagtttggaacaagagtccactattaaagaacgtggactccaacgtcaaagggcgaaaaaccgtctatcagggcgatggcccactacgtgaaccatcaccctaatcaagttttttggggtcgaggtgccgtaaagcactaaatcggaaccctaaagggagcccccgatttagagcttgacggggaaagccggcgaacgtggcgagaaaggaagggaagaaagcgaaaggagcgggcgctagggcgctggcaagtgtagcggtcacgctgcgcgtaaccaccacacccgccgcgcttaatgcgccgctacagggcgcgtccattcgccattcaggctgcgcaactgttgggaagggcgatcggtgcgggcctcttcgctattacgccagctggcgaaagggggatgtgctgcaaggcgattaagttgggtaacgccagggttttcccagtcacgacgttgtaaaacgacggccagtgcatagaccagccgcgtaacctggcaaaatcggttacggttgagtaataaatggatgccctgcgtaagcgggtgtgggcggacaataaagtcttaaactgaacaaaatagatctaaactatgacaataaagtcttaaactagacagaatagttgtaaactgaaatcagtccagttatgctgtgaaaaagcatactggacttttgttatggctaaagcaaactcttcattttctgaagtgcaaattgcccgtcgtattaaagaggggcgtggccaagggcatggtaaagactatattcgcggcgttgtgacaatttaccgaacaactccgcggccgggaagccgatctcggcttgaacgaattgttaggtggcggtacttgggtcgatatcaaagtgcatcacttcttcccgtatgcccaactttgtatagagagccactgcgggatcgtcaccgtaatctgcttgcacgtagatcacataagcaccaagcgcgttggcctcatgcttgaggagattgatgagcgcggtggcaatgccctgcctccggtgctcgccggagactgcgagatcatagatatagatctcactacgcggctgctcaaacttgggcagaacgtaagccgcgagagcgccaacaaccgcttcttggtcgaaggcagcaagcgcgatgaatgtcttactacggagcaagttcccgaggtaatcggagtccggctgatgttgggagtaggtggctacgtctccgaactcacgaccgaaaagatcaagagcagcccgcatggatttgacttggtcagggccgagcctacatgtgcgaatgatgcccatacttgagccacctaactttgttttagggcgactgccctgctgcgtaacatcgttgctgctgcgtaacatcgttgctgctccataacatcaaacatcgacccacggcgtaacgcgcttgctgcttggatgcccgaggcatagactgtacaaaaaaacagtcataacaagccatgaaaaccgccactgcgccgttaccaccgctgcgttcggtcaaggttctggaccagttgcgtgagcgcatacgctacttgcattacagtttacgaaccgaacaggcttatgtcaactgggtttgtgccttcatccgtttccacggtgtgcgtcacccggcaaccttgggcagcagcgaagtcgaggcatttctgtcctggctggcgaacgagcgcaaggtttcggtctccacgcatcgtcaggcattggcggccttgctgttcttctacggcaaggtgctgtgcacggatctgcccttgcttcaggagatcggtagacctcggccgtcgcggcgcttgccggtggtgctgaccccggatgaagtggttcgcatcctcggttttctggaaggcgagcatcgtttgttcgcccaggactctagctatagttctagtggttggctacagctttgtttgtactatcaacaggttgaactgctgatcaacagatcctctacgcggccgcggtaccataacttcgtatagcatacattatacgaagttatctggttttactagtatcgattcgcgacctactccggaatattaatagatcatggagataattaaaatgataaccatctcgcaaataaataagtattttactgttttcgtaacagttttgtaataaaaaaacctataaatattccggattattcataccgtcccaccatcgggcgcggatccgccaccatgcgtcccggcctgccctcctacctgatcgtgctggctgtgtgcctgctgtcccacctcctgtcctcccgttacggtgctgaggctatctccgagcccctggacaaggctttccacctcctgctgaacacctacggtcgtcctatccgtttcctgcgcgagaacaccacccagtgcacctacaactcctccctgcgcaactccaccgtcgtccgcgagaacgctatctccttcaacttcttccagtcctacaaccagtactacgtgttccacatgccccgttgcctgttcgctggtcccctggctgagcagttcctgaaccaggtggacctgaccgagactctcgagcgttaccagcagcgtctgaacacttacgctctggtgtccaaggacctggcttcctaccgttccttcagccagcagctgaaggctcaggactccctgggcgagcagcccaccactgtgcctccccctatcgacctgtccatcccccacgtgtggatgcccccccagaccactcctcacggctggaccgagtcccacaccacctccggactgcaccgtccccacttcaaccagacctgcatcctgttcgacggtcacgacctgctgttctccaccgtgaccccctgcctgcaccagggcttctacctcatcgacgagctgcgttacgtgaagatcaccctgaccgaggatttcttcgtggtcaccgtgtccatcgacgacgacacccccatgctgctgatcttcggtcacctcccccgtgtgctgttcaaggctccctaccagcgtgacaacttcatcctgcgtcagaccgagaagcacgagctgctggtgctggtcaagaaggaccagctgaaccgtcactcttacctgaaggaccccgacttcctggacgctgctctggacttcaactacctggacctgtccgctctgctgaggaactccttccaccgttacgctgtggacgtgctgaagtccggtcgttgccagatgctggaccgtcgtaccgtcgagatggctttcgcttacgccctggctctgttcgctgctgctcgtcaagaagaggctggcgctcaggtgtccgtgccccgtgctctggaccgtcaggctgctctgctgcagatccaagagttcatgatcacttgcctgtcccagaccccccctcgtaccaccctgctgctgtaccccaccgctgtggacctggctaagcgtgctctgtggacccccaaccagatcaccgacatcacctccctcgtgcgtctggtgtacatcctgtccaagcagaaccagcagcacctgatcccccagtgggctctgcgtcagatcgctgacttcgctctgaagctgcacaagacccacctggcttcattcctcagcgctttcgctcgccaagagctgtacctgatgggttccctggtgcactccatgctggtgcacaccaccgagcgtcgcgagatcttcatcgtggaaaccggcctgtgctccctggccgagctgtcccacttcacccagctgctggctcacccccaccacgagtacctgtccgacctgtacaccccctgctcctcttccggtcgtcgtgaccactccctggaacgtctgacccgtctgttccccgacgctaccgtgcctaccaccgtgcctgctgctctgtccatcctgtctaccatgcagccctccaccctggaaaccttccccgacctgttctgcctgcctctgggcgagtccttctccgctctgaccgtgtccgagcacgtgtcctacgtggtcaccaaccagtacctgatcaagggcatctcctaccccgtgtccaccaccgtcgtgggccagtccctgatcatcacccagaccgactcccagaccaagtgcgagctgacccgtaacatgcacaccactcactccatcaccgctgctctgaacatctccctcgagaactgcgctttctgccagtccgctctgttggagtacgacgacactcagggtgtcatcaacatcatgtacatgcacgactccgacgacgtgctgttcgctctggacccctacaacgaggtggtggtgtcctccccccgtacccactacctgatgctgctgaagaacggcaccgtgctggaagtgaccgacgtggtggtggacgctaccgaccgtctgctgatgatgtccgtgtacgctctgtccgctatcatcggcatctacctgctgtaccgtatgctgaagacctgcggttcctccggtggcgccggtggctccggttcctctggcggttctggttcctccgctcaacttgagaaagaactgcaggctctcgaaaaagaaaacgcccaactcgaatgggagctgcaagccttggaaaaagaactggcccaattggaaaaagaaaaccaggctttggaatgggagctggctcagtaaggcgccaagctttgtcgagaagtactagaggatcataatcagccataccacatttgtagaggttttacttgctttaaaaaacctcccacacctccccctgaacctgaaacataaaatgaatgcaattgttgttgttaacttgtttattgcagcttataatggttacaaataaagcaatagcatcacaaatttcacaaataaagcatttttttcactgcattctagttgtggtttgtccaaactcatcaatgtatcttatcatgtctggatctgatcactgcttgagcctagaagatccggctgctaacaaagcccgaaaggaagctgagttggctgctgccaccgctgagcaataactatcataacccctaggggcctctaaacgggtcttgaggggttttttgctgaaaggaggaactatatccggatctgaacaggagggacagctgatagaaacagaagccactggagcacctcaaaaacaccatcatacactaaatcagtaagttggcagcatcacccgacgcactttgcgccgaataaatacctgtgacggaagatcacttcgcagaataaataaatcctggtgtccctgttgataccgggaagccctgggccaacttttggcgaaaatgagacgttgatcggcacgtaagaggttccaactttcaccataatgaaataagatcactaccgggcgtattttttgagttatcgagattttcaggagctaaggaagctaaaatggagaaaaaaatcactggatataccaccgttgatatatcccaatggcatcgtaaagaacattttgaggcatttcagtcagttgctcaatgtacctataaccagaccgttcagctggatattacggcctttttaaagaccgtaaagaaaaataagcacaagttttatccggcctttattcacattcttgcccgcctgatgaatgctcatccggaattccgtatggcaatgaaagacggtgagctggtgatatgggatagtgttcacccttgttacaccgttttccatgagcaaactgaaacgttttcatcgctctggagtgaataccacgacgatttccggcagtttctacacatatattcgcaagatgtggcgtgttacggtgaaaacctggcctatttccctaaagggtttattgagaatatgtttttcgtctcagccaatccctgggtgagtttcaccagttttgatttaaacgtggccaatatggacaacttcttcgcccccgttttcaccatgggcaaatattatacgcaaggcgacaaggtgctgatgccgctggcgattcaggttcatcatgccgtttgtgatggcttccatgtcggcagaatgcttaatgaattacaacagtactgcgatgagtggcagggcggggcgtaatttttttaaggcagttattggtgcccttaaacgcctggttgctacgcctgaataagtgataataagcggatgaatggcagaaattcgaaagcaaattcgacccggtcgtcggttcagggcagggtcgttaaatagccgcttatgtctattgctggtttaccggtttattgactaccggaagcagtgtgaccgtgtgcttctcaaatgcctgaggccagtttgctcaggctctccccgtggaggtaataattgacgatatgatcatttattctgcctcccagctgacattcatccggggtcagcaccgtttctgcggactggctttctacgtgttccgcttcctttagcagcccttgcgccctgagtgcttgcggcagcgtgaagctaattctgtcagccgttaagtgttcctgtgtcactcaaaattgctttgagaggctctaagggcttctcagtgcgttacatccctggcttgttgtccacaaccgttaaaccttaaaagctttaaaagccttatatattcttttttttcttataaaacttaaaaccttagaggctatttaagttgctgatttatattaattttattgttcaaacatgagagcttagtacgtgaaacatgagagcttagtacgttagccatgagagcttagtacgttagccatgagggtttagttcgttaaacatgagagcttagtacgttaaacatgagagcttagtacgtgaaacatgagagcttagtacgtactatcaacaggttgaactgctgatcaacagatcctctacgcggccgcggtaccataacttcgtatagcatacattatacgaagttatctggtttaaacgtacccgtagtggctatggcagggcttgccgccccgacgttggctgcgagccctgggccttcacccgaacttgggggttggggtggggaaaaggaagaaacgcgggcgtattggtcccaatggggtctcggtggggtatcgacagagtgccagccctgggaccgaaccccgcgtttatgaacaaacgacccaacacccgtgcgttttattctgtctttttattgccgtcatagcgcgggttccttccggtattgtctccttccgtgtttcagttagcctcccccatctcccggtaccgcatgctatgcttagtgatggtggtggtgatggtggtggctgcctccccccccagacccccctccgccgcttcctttttcgaactgcgggtggctccagctacctccgccgggcccctggaacagaacttccagggcgccttagcgagcgtccacagcctggggaccgtaacgggagtgagcgggcaggttcacacgggtctgcttcagctcagggggcaggccagcgtagtacttgtccaggtgacgcagcaggggggggtccagctggtgacgcaggcagaattccttcacagcgttgtacaggccgtagaacagggtgataccctcgggagcagcagcggtggacacgggcagacgcacagcacggttggtacgggtagcctcgttacggatagccaccaccacgttgaacagggaggggggcaccagctcgaaacccagcacgtgttcggtgaagatggaacgaccgtaggacagacgagtcaggtcgtaaccacggcacaggtcgtccacgcaagtgtacacagcgggggaaccgtcgccgcactcggagtaaccgcgcatcacggtcatccaacggggagcggtgtcggaggacagcagggtcagcagagcacgcagctggtcggggttgttgtacagcagggccagggtgtccaggaaagcgtcgtccagcagcacggagttagcagcctcgggggtcacgggacggtaacggatcagctgggacaggggaccgtccctacgggtcacgttgaccaggggacgcagccaggactcgtacttgtcgccctggaacacctctcccagcaggcaacgacgggtcagctcggggcactcagcgggcaccttctcagccacggtgggagccacggacacggtagcggaggacacgatgggcagcagcaggcagcaccacagcagagccacgggaccgggggagaaggagaaaccgcagtcgggacgacggcacatggtggctcgagatcccgggtgatcaagtcttcgtcgagtgattgtaaataaaatgtaatttacagtatagtattttaattaatatacaaatgatttgataataattcttatttaactataatatattgtgttgggttgaattaaaggtccgtatactagtatcgattcgcgacctactccggaatattaatagatcatggagataattaaaatgataaccatctcgcaaataaataagtattttactgttttcgtaacagttttgtaataaaaaaacctataaatattccggattattcataccgtcccaccatcgggcgcggatccgccaccatgtcccccaagaacctgacccccttcctgaccgctctgtggctgctgctgggccactcccgtgtgcctcgtgtgcgtgctgaggaatgctgcgagttcatcaacgtgaaccacccccccgagcgctgctacgacttcaagatgtgcaaccgtttcaccgtggctctgcgttgccccgacggcgaagtgtgctactcccccgaaaagaccgctgagatccgtggtatcgtgaccaccatgacccactccctgacccgtcaggtggtgcacaacaagctgacctcttgcaactacaaccccctgtacctcgaggctgacggtcgtatccgttgcggcaaggtcaacgacaaggctcagtacctgctgggtgctgctggttccgtgccctaccgttggatcaacctcgagtacgacaagatcacccgtatcgtgggcctggaccagtacctcgagtccgtgaagaagcacaagcgtctggacgtgtgccgtgctaagatgggttacatgctgcagtaaaagcttgtcgagaagtactagaggatcataatcagccataccacatttgtagaggttttacttgctttaaaaaacctcccacacctccccctgaacctgaaacataaaatgaatgcaattgttgttgttaacttgtttattgcagcttataatggttacaaataaagcaatagcatcacaaatttcacaaataaagcatttttttcactgcattctagttgtggtttgtccaaactcatcaatgtatcttatcatgtctggatctgatcactgcttgagcctagaagatccggctgctaacaaagcccgaaaggaagctgagttggctgctgtggctagctttgtttaactttaagaaggagatacatctagaccggaatattaatagatcatggagataattaaaatgataaccatctcgcaaataaataagtattttactgttttcgtaacagttttgtaataaaaaaacctataaatattccggattattcataccgtcccaccatcgggcgcggatccgccaccatgctgcgtctgctgctgcgtcaccacttccactgcctgctgctgtgcgctgtgtgggctaccccctgcctggcttccccttggtccaccctgaccgctaaccagaacccctccccaccctggtccaagctgacctactccaagccccacgacgctgctaccttctactgccccttcctgtacccatccccccctcgttccccactgcagttctccggtttccagcgtgtgctgaccggtcccgagtgccgtaacgagactctgtacctgctgtacaaccgcgagggccagaccctggtcgagaggtcctccacctgggtcaagaaggtcatctggtacttgtccggtcgtaaccagaccatcctgcagcgtatgccccgtaccgcttccaagccctccgacggcaacgtgcagatctccgtcgaggacgctaagatcttcggtgctcacatggtgcccaagcagaccaagctgctgcgtttcgtggtcaacgacggcacccgttaccagatgtgcgtgatgaagctcgagtcctgggctcacgtgttccgtgactactccgtgtccttccaagtgcgcctgaccttcaccgaggctaacaaccagacctacaccttctgcacccaccccaacctgatcgtgtaaaagcttgtcgagaagtactagaggatcataatcagccataccacatttgtagaggttttacttgctttaaaaaacctcccacacctccccctgaacctgaaacataaaatgaatgcaattgttgttgttaacttgtttattgcagcttataatggttacaaataaagcaatagcatcacaaatttcacaaataaagcatttttttcactgcattctagttgtggtttgtccaaactcatcaatgtatcttatcatgtctggatctgatcactgcttgagcctagaagatccggctgctaacaaagcccgaaaggaagctgagttggctgctgggtgcctaatgagtgagctaactcacattaattgcccggaatattaatagatcatggagataattaaaatgataaccatctcgcaaataaataagtattttactgttttcgtaacagttttgtaataaaaaaacctataaatattccggattattcataccgtcccaccatcgggcgcggatccgccaccatgcgtctgtgccgtgtgtggctgtccgtgtgcctgtgcgctgtggtgctgggccagtgccagcgtgaaaccgctgagaagaacgactactaccgtgtgccccactactgggacgcttgctcccgtgctctgcccgaccagacccgttacaagtacgtcgagcagctggtggacctgaccctgaactaccactacgacgcttcccacggcctggacaacttcgacgtgctgaagcgtatcaacgtgaccgaggtgtccctgctgatctccgacttccgtcgtcagaaccgtcgtggtggcaccaacaagcgtaccaccttcaacgctgctggttccctggctccccacgctcgttccctcgagttctccgtgcgtctgttcgctaactaaaagcttgtcgagaagtactagaggatcataatcagccataccacatttgtagaggttttacttgctttaaaaaacctcccacacctccccctgaacctgaaacataaaatgaatgcaattgttgttgttaacttgtttattgcagcttataatggttacaaataaagcaatagcatcacaaatttcacaaataaagcatttttttcactgcattctagttgtggtttgtccaaactcatcaatgtatcttatcatgtctggatctgatcactgcttgagcctagaagatccggctgctaacaaagcccgaaaggaagctgagttggctgctgccaccgctgagcaataactatcataacccctaggagatccgaaccagataagtgaaatctagttccaaactattttgtcatttttaattttcgtattagcttacgacgctacacccagttcccatctattttgtcactcttccctaaataatccttaaaaactccatttccacccctcccagttcccaactattttgtccgcccaca

SEQ ID NO: 26 - DNA, 11619 bp, Artificial Sequence; identical to SEQ ID NO: 25
  Synthetic construct

SEQ ID NO: 27 - DNA, 12844 bp, Artificial Sequence
  Synthetic construct
ttgttccagtttggaacaagagtccactattaaagaacgtggactccaacgtcaaagggcgaaaaaccgtctatcagggcgatggcccactacgtgaaccatcaccctaatcaagttttttggggtcgaggtgccgtaaagcactaaatcggaaccctaaagggagcccccgatttagagcttgacggggaaagccggcgaacgtggcgagaaaggaagggaagaaagcgaaaggagcgggcgctagggcgctggcaagtgtagcggtcacgctgcgcgtaaccaccacacccgccgcgcttaatgcgccgctacagggcgcgtccattcgccattcaggctgcgcaactgttgggaagggcgatcggtgcgggcctcttcgctattacgccagctggcgaaagggggatgtgctgcaaggcgattaagttgggtaacgccagggttttcccagtcacgacgttgtaaaacgacggccagtgcatagaccagccgcgtaacctggcaaaatcggttacggttgagtaataaatggatgccctgcgtaagcgggtgtgggcggacaataaagtcttaaactgaacaaaatagatctaaactatgacaataaagtcttaaactagacagaatagttgtaaactgaaatcagtccagttatgctgtgaaaaagcatactggacttttgttatggctaaagcaaactcttcattttctgaagtgcaaattgcccgtcgtattaaagaggggcgtggccaagggcatggtaaagactatattcgcggcgttgtgacaatttaccgaacaactccgcggccgggaagccgatctcggcttgaacgaattgttaggtggcggtacttgggtcgatatcaaagtgcatcacttcttcccgtatgcccaactttgtatagagagccactgcgggatcgtcaccgtaatctgcttgcacgtagatcacataagcaccaagcgcgttggcctcatgcttgaggagattgatgagcgcggtggcaatgccctgcctccggtgctcgccggagactgcgagatcatagatatagatctcactacgcggctgctcaaacttgggcagaacgtaagccgcgagagcgccaacaaccgcttcttggtcgaaggcagcaagcgcgatgaatgtcttactacggagcaagttcccgaggtaatcggagtccggctgatgttgggagtaggtggctacgtctccgaactcacgaccgaaaagatcaagagcagcccgcatggatttgacttggtcagggccgagcctacatgtgcgaatgatgcccatacttgagccacctaactttgttttagggcgactgccctgctgcgtaacatcgttgctgctgcgtaacatcgttgctgctccataacatcaaacatcgacccacggcgtaacgcgcttgctgcttggatgcccgaggcatagactgtacaaaaaaacagtcataacaagccatgaaaaccgccactgcgccgttaccaccgctgcgttcggtcaaggttctggaccagttgcgtgagcgcatacgctacttgcattacagtttacgaaccgaacaggcttatgtcaactgggtttgtgccttcatccgtttccacggtgtgcgtcacccggcaaccttgggcagcagcgaagtcgaggcatttctgtcctggctggcgaacgagcgcaaggtttcggtctccacgcatcgtcaggcattggcggccttgctgttcttctacggcaaggtgctgtgcacggatctgcccttgcttcaggagatcggtagacctcggccgtcgcggcgcttgccggtggtgctgaccccggatgaagtggttcgcatcctcggttttctggaaggcgagcatcgtttgttcgcccaggactctagctatagttctagtggttggctacagctttgtttgtactatcaacaggttgaactgctgatcaacagatcctctacgcggccgcggtaccataacttcgtatagcatacattatacgaagttatctggtttaaacgtacccgtagtggctatggcagggcttgccgccccgacgttggctgcgagccctgggccttcacccgaacttgggggttggggtggggaaaaggaagaaacgcgggcgtattggtcccaatggggtctcggtggggtatcgacagagtgccagccctgggaccgaaccccgcgtttatgaacaaacgacccaacacccgtgcgttttattctgtctttttattgccgtcatagcgcgggttccttccggtattgtctccttccgtgtttcagttagcctcccccatctcccggtaccgcatgctatgcatcagctgctagcttagcgagcgtccacagcctggggaccgtaacgggagtgagcgggcaggttcacacgggtctgcttcagctcagggggcaggccagcgtagtacttgtccaggtgacgcagcaggggggggtccagctggtgacgcaggcagaattccttcacagcgttgtacaggccgtagaacagggtgataccctcgggagcagcagcggtggacacgggcagacgcacagcacggttggtacgggtagcctcgttacggatagccaccaccacgttgaacagggaggggggcaccagctcgaaacccagcacgtgttcggtgaagatggaacgaccgtaggacagacgagtcaggtcgtaaccacggcacaggtcgtccacgcaagtgtacacagcgggggaaccgtcgccgcactcggagtaaccgcgcatcacggtcatccaacggggagcggtgtcggaggacagcagggtcagcagagcacgcagctggtcggggttgttgtacagcagggccagggtgtccaggaaagcgtcgtccagcagcacggagttagcagcctcgggggtcacgggacggtaacggatcagctgggacaggggaccgtccctacgggtcacgttgaccaggggacgcagccaggactcgtacttgtcgccctggaacacctctcccagcaggcaacgacgggtcagctcggggcactcagcgggcaccttctcagccacggtgggagccacggacacggtagcggaggacacgatgggcagcagcaggcagcaccacagcagagccacgggaccgggggagaaggagaaaccgcagtcgggacgacggcacatggtggctcgagatcccgggtgatcaagtcttcgtcgagtgattgtaaataaaatgtaatttacagtatagtattttaattaatatacaaatgatttgataataattcttatttaactataatatattgtgttgggttgaattaaaggtccgtatactagtatcgattcgcgacctactccggaatattaatagatcatggagataattaaaatgataaccatctcgcaaataaataagtattttactgttttcgtaacagttttgtaataaaaaaacctataaatattccggattattcataccgtcccaccatcgggcgcggatccgccaccatgtcccccaagaacctgacccccttcctgaccgctctgtggctgctgctgggccactcccgtgtgcctcgtgtgcgtgctgaggaatgctgcgagttcatcaacgtgaaccacccccccgagcgctgctacgacttcaagatgtgcaaccgtttcaccgtggctctgcgttgccccgacggcgaagtgtgctactcccccgaaaagaccgctgagatccgtggtatcgtgaccaccatgacccactccctgacccgtcaggtggtgcacaacaagctgacctcttgcaactacaaccccctgtacctcgaggctgacggtcgtatccgttgcggcaaggtcaacgacaaggctcagtacctgctgggtgctgctggttccgtgccctaccgttggatcaacctcgagtacgacaagatcacccgtatcgtgggcctggaccagtacctcgagtccgtgaagaagcacaagcgtctggacgtgtgccgtgctaagatgggttacatgctgcagtaaaagcttgtcgagaagtactagaggatcataatcagccataccacatttgtagaggttttacttgctttaaaaaacctcccacacctccccctgaacctgaaacataaaatgaatgcaattgttgttgttaacttgtttattgcagcttataatggttacaaataaagcaatagcatcacaaatttcacaaataaagcatttttttcactgcattctagttgtggtttgtccaaactcatcaatgtatcttatcatgtctggatctgatcactgcttgagcctagaagatccggctgctaacaaagcccgaaaggaagctgagttggctgctgtggctagctttgtttaactttaagaaggagatacatctagaccggaatattaatagatcatggagataattaaaatgataaccatctcgcaaataaataagtattttactgttttcgtaacagttttgtaataaaaaaacctataaatattccggattattcataccgtcccaccatcgggcgcggatccgccaccatgctgcgtctgctgctgcgtcaccacttccactgcctgctgctgtgcgctgtgtgggctaccccctgcctggcttccccttggtccaccctgaccgctaaccagaacccctccccaccctggtccaagctgacctactccaagccccacgacgctgctaccttctactgccccttcctgtacccatccccccctcgttccccactgcagttctccggtttccagcgtgtgctgaccggtcccgagtgccgtaacgagactctgtacctgctgtacaaccgcgagggccagaccctggtcgagaggtcctccacctgggtcaagaaggtcatctggtacttgtccggtcgtaaccagaccatcctgcagcgtatgccccgtaccgcttccaagccctccgacggcaacgtgcagatctccgtcgaggacgctaagatcttcggtgctcacatggtgcccaagcagaccaagctgctgcgtttcgtggtcaacgacggcacccgttaccagatgtgcgtgatgaagctcgagtcctgggctcacgtgttccgtgactactccgtgtccttccaagtgcgcctgaccttcaccgaggctaacaaccagacctacaccttctgcacccaccccaacctgatcgtgtaaaagcttgtcgagaagtactagaggatcataatcagccataccacatttgtagaggttttacttgctttaaaaaacctcccacacctccccctgaacctgaaacataaaatgaatgcaattgttgttgttaacttgtttattgcagcttataatggttacaaataaagcaatagcatcacaaatttcacaaataaagcatttttttcactgcattctagttgtggtttgtccaaactcatcaatgtatcttatcatgtctggatctgatcactgcttgagcctagaagatccggctgctaacaaagcccgaaaggaagctgagttggctgctgggtgcctaatgagtgagctaactcacattaattgcccggaatattaatagatcatggagataattaaaatgataaccatctcgcaaataaataagtattttactgttttcgtaacagttttgtaataaaaaaacctataaatattccggattattcataccgtcccaccatcgggcgcggatccgccaccatgcgtctgtgccgtgtgtggctgtccgtgtgcctgtgcgctgtggtgctgggccagtgccagcgtgaaaccgctgagaagaacgactactaccgtgtgccccactactgggacgcttgctcccgtgctctgcccgaccagacccgttacaagtacgtcgagcagctggtggacctgaccctgaactaccactacgacgcttcccacggcctggacaacttcgacgtgctgaagcgtatcaacgtgaccgaggtgtccctgctgatctccgacttccgtcgtcagaaccgtcgtggtggcaccaacaagcgtaccaccttcaacgctgctggttccctggctccccacgctcgttccctcgagttctccgtgcgtctgttcgctaactaaaagcttgtcgagaagtactagaggatcataatcagccataccacatttgtagaggttttacttgctttaaaaaacctcccacacctccccctgaacctgaaacataaaatgaatgcaattgttgttgttaacttgtttattgcagcttataatggttacaaataaagcaatagcatcacaaatttcacaaataaagcatttttttcactgcattctagttgtggtttgtccaaactcatcaatgtatcttatcatgtctggatctgatcactgcttgagcctagaagatccggctgctaacaaagcccgaaaggaagctgagttggctgctgccaccgctgagcaataactatcataacccccggaatattaatagatcatggagataattaaaatgataaccatctcgcaaataaataagtattttactgttttcgtaacagttttgtaataaaaaaacctataaatattccggattattcataccgtcccaccatcgggcgcggatcccggtccgaagcgcgcggaattcaaaggcctaccgtcgacgccaccatggaatcccgtatctggtgcctggtcgtgtgcgtgaacctgtgcatcgtgtgcctgggtgctgctgtgtcctcctcctccacccgtggcacctccgctacccactcccaccactcctcccacaccacctccgccgctcactcccgttccggttccgtgtcccagcgtgtgacctcctcccagaccgtgtcccacggtgtcaacgagactatctacaacaccaccctgaagtacggcgacgtcgtgggtgtcaacaccaccaagtacccctaccgtgtgtgctccatggctcagggcaccgacctgatccgtttcgagcgtaacatcgtgtgcacctccatgaagcccatcaacgaggacctggacgagggtatcatggtggtgtacaagcgcaacatcgtggctcacaccttcaaggtccgcgtgtaccagaaggtgctgaccttccgtcgttcctacgcttacatccacaccacttacctgctgggttccaacaccgagtacgtggcccctcccatgtgggagatccaccacatcaactcccactcccagtgctactcctcttactcccgtgtgatcgctggcaccgtgttcgtggcttaccaccgtgactcctacgagaacaagaccatgcagctgatgcccgacgactactccaacacccactccacccgttacgtgaccgtgaaggaccagtggcactcccgtggttccacctggctgtaccgtgaaacctgcaacctgaactgcatggtcaccatcaccaccgctcgttccaagtacccttaccacttcttcgctacctccaccggcgacgtggtggacatctcccccttctacaacggtactaaccgtaacgcttcctacttcggcgagaacgctgacaagttcttcatcttccccaactacaccatcgtgtccgacttcggtcgtcccaactccgctctggaaacccaccgtctggtggctttcttggagcgtgctgactccgtgatctcctgggacatccaggacgagaagaacgtgacctgccagctgaccttctgggaggcttccgagcgtaccatccgttccgaggctgaggactcctaccacttctccagcgctaagatgaccgctaccttcctgtccaagaaacaagaggtcaacatgtccgactccgccctggactgcgtgcgtgacgaggctatcaacaagctgcagcagatcttcaacacctcctacaaccagacctacgagaagtacggaaacgtgtccgtgttcgagactaccggtggcctggtggtgttctggcagggtatcaagcagaagtccctggtcgagctggaacgtctggctaaccgttcctccctgaacctgacccacaaccgtaccaagcgttccaccgacggcaacaacgctactcacctgtccaacatggaatccgtgcacaacctggtgtacgctcagctgcagttcacctacgacaccctgcgcggttacatcaaccgtgctctggctcagatcgctgaggcttggtgcgtggaccagcgtcgtaccctggaagtgttcaaggaactgtccaagatcaacccctccgctatcctgtccgccatctacaacaagcctatcgctgctcgtttcatgggcgacgtgctgggcctggcttcctgcgtgaccatcaaccagacttccgtgaaggtgctgcgtgacatgaacgtgaaggaatcccccggtcgttgctactcccgtcccgtggtcatcttcaacttcgctaactcctcctacgtgcagtacggccagctgggcgaggacaacgagatcctgctgggcaaccaccgtaccgaggaatgccagctgccctccctgaagatcttcatcgctggcaactccgcttacgaatacgtggactacctgttcaagcgcatgatcgacctgtcctccatctctaccgtggactccatgatcgctctggacatcgaccccctggaaaacaccgacttccgtgtgctggaactgtactcccagaaggaactgcgttccatcaacgtgttcgacctggaagagatcatgcgcgagttcaactcctacaagcagcgtgttaagtacgtcgaggacaaggtggtggaccccctgcccccctacctgaagggactggacgacctgatgtccggcctgggagctgccggcaaggctgtgggtgtcgctatcggtgctgtgggtggtgctgtggcttccgtggtcgagggtgtcgccaccttcctgaagaaccccttcggtgctttcaccatcatcctggtggctatcgctgtggtcatcatcatctacctgatctacacccgtcagcgtcgtctgtgcatgcagcccctgcagaacctgttcccctacctggtgtccgctgacggtactaccgtgacctccggcaacaccaaggacacctccctgcaggctcccccatcctacgaggaatccgtctacaactccggtcgcaagggtcccggtcccccttcctccgacgcttctaccgctgctcccccatacaccaacgagcaggcttaccagatgctgctggctctcgtgcgtctggacgctgagcagcgtgcacagcagaacggcaccgactccctggacggccagaccggaacccaggacaagggccagaagcccaacctgctggaccgtctgcgtcaccgcaagaacggttaccgtcacctgaaggactccgacgaggaagagaacgtctaaggcgcgccaagcttgtcgagaagtactagagatcataatcagccataccacatttgtagaggttttacttgctttaaaaaacctcccacacctccccctgaacctgaaacataaaatgaatgcaattgttgttgttaacttgtttattgcagcttataatggttacaaataaagcaatagcatcacaaatttcacaaataaagcatttttttcactgcattctagttgtggtttgtccaaactcatcaatgtatcttatcatgtctggatctgatcactgcttgagcctagaagatccggctgctaacaaagcccgaaaggaagctgggaatattaatagatcatggagataattaaaatgataaccatctcgcaaataaataagtattttactgttttcgtaacagttttgtaataaaaaaacctataaatattccggattattcataccgtcccaccatcgggcgcggatccgccaccatgcgtcccggcctgccctcctacctgatcgtgctggctgtgtgcctgctgtcccacctcctgtcctcccgttacggtgctgaggctatctccgagcccctggacaaggctttccacctcctgctgaacacctacggtcgtcctatccgtttcctgcgcgagaacaccacccagtgcacctacaactcctccctgcgcaactccaccgtcgtccgcgagaacgctatctccttcaacttcttccagtcctacaaccagtactacgtgttccacatgccccgttgcctgttcgctggtcccctggctgagcagttcctgaaccaggtggacctgaccgagactctcgagcgttaccagcagcgtctgaacacttacgctctggtgtccaaggacctggcttcctaccgttccttcagccagcagctgaaggctcaggactccctgggcgagcagcccaccactgtgcctccccctatcgacctgtccatcccccacgtgtggatgcccccccagaccactcctcacggctggaccgagtcccacaccacctccggactgcaccgtccccacttcaaccagacctgcatcctgttcgacggtcacgacctgctgttctccaccgtgaccccctgcctgcaccagggcttctacctcatcgacgagctgcgttacgtgaagatcaccctgaccgaggatttcttcgtggtcaccgtgtccatcgacgacgacacccccatgctgctgatcttcggtcacctcccccgtgtgctgttcaaggctccctaccagcgtgacaacttcatcctgcgtcagaccgagaagcacgagctgctggtgctggtcaagaaggaccagctgaaccgtcactcttacctgaaggaccccgacttcctggacgctgctctggacttcaactacctggacctgtccgctctgctgaggaactccttccaccgttacgctgtggacgtgctgaagtccggtcgttgccagatgctggaccgtcgtaccgtcgagatggctttcgcttacgccctggctctgttcgctgctgctcgtcaagaagaggctggcgctcaggtgtccgtgccccgtgctctggaccgtcaggctgctctgctgcagatccaagagttcatgatcacttgcctgtcccagaccccccctcgtaccaccctgctgctgtaccccaccgctgtggacctggctaagcgtgctctgtggacccccaaccagatcaccgacatcacctccctcgtgcgtctggtgtacatcctgtccaagcagaaccagcagcacctgatcccccagtgggctctgcgtcagatcgctgacttcgctctgaagctgcacaagacccacctggcttcattcctcagcgctttcgctcgccaagagctgtacctgatgggttccctggtgcactccatgctggtgcacaccaccgagcgtcgcgagatcttcatcgtggaaaccggcctgtgctccctggccgagctgtcccacttcacccagctgctggctcacccccaccacgagtacctgtccgacctgtacaccccctgctcctcttccggtcgtcgtgaccactccctggaacgtctgacccgtctgttccccgacgctaccgtgcctaccaccgtgcctgctgctctgtccatcctgtctaccatgcagccctccaccctggaaaccttccccgacctgttctgcctgcctctgggcgagtccttctccgctctgaccgtgtccgagcacgtgtcctacgtggtcaccaaccagtacctgatcaagggcatctcctaccccgtgtccaccaccgtcgtgggccagtccctgatcatcacccagaccgactcccagaccaagtgcgagctgacccgtaacatgcacaccactcactccatcaccgctgctctgaacatctccctcgagaactgcgctttctgccagtccgctctgttggagtacgacgacactcagggtgtcatcaacatcatgtacatgcacgactccgacgacgtgctgttcgctctggacccctacaacgaggtggtggtgtcctccccccgtacccactacctgatgctgctgaagaacggcaccgtgctggaagtgaccgacgtggtggtggacgctaccgaccgtctgctgatgatgtccgtgtacgctctgtccgctatcatcggcatctacctgctgtaccgtatgctgaagacctgcggttcctccggtggcgccggtggctccggttcctctggcggttctggttcctccgctcaacttgagaaagaactgcaggctctcgaaaaagaaaacgcccaactcgaatgggagctgcaagccttggaaaaagaactggcccaattggaaaaagaaaaccaggctttggaatgggagctggctcagtaaggcgccaagctttgtcgagaagtactagaggatcataatcagccataccacatttgtagaggttttacttgctttaaaaaacctcccacacctccccctgaacctgaaacataaaatgaatgcaattgttgttgttaacttgtttattgcagcttataatggttacaaataaagcaatagcatcacaaatttcacaaataaagcatttttttcactgcattctagttgtggtttgtccaaactcatcaatgtatcttatcatgtctggatctgatcactgcttgagcctagaagatccggctgctaacaaagcccgaaaggaagctgagttggctgctgccaccgctgagcaataactatcataacccctaggagatccgaaccagataagtgaaatctagttccaaactattttgtcatttttaattttcgtattagcttacgacgctacacccagttcccatctattttgtcactcttccctaaataatccttaaaaactccatttccacccctcccagttcccaactattttgtccgcccaca

SEQ ID NO: 28 - DNA, 14218 bp, Artificial Sequence
  Synthetic construct
ttgttccagtttggaacaagagtccactattaaagaacgtggactccaacgtcaaagggcgaaaaaccgtctatcagggcgatggcccactacgtgaaccatcaccctaatcaagttttttggggtcgaggtgccgtaaagcactaaatcggaaccctaaagggagcccccgatttagagcttgacggggaaagccggcgaacgtggcgagaaaggaagggaagaaagcgaaaggagcgggcgctagggcgctggcaagtgtagcggtcacgctgcgcgtaaccaccacacccgccgcgcttaatgcgccgctacagggcgcgtccattcgccattcaggctgcgcaactgttgggaagggcgatcggtgcgggcctcttcgctattacgccagctggcgaaagggggatgtgctgcaaggcgattaagttgggtaacgccagggttttcccagtcacgacgttgtaaaacgacggccagtgcatagaccagccgcgtaacctggcaaaatcggttacggttgagtaataaatggatgccctgcgtaagcgggtgtgggcggacaataaagtcttaaactgaacaaaatagatctaaactatgacaataaagtcttaaactagacagaatagttgtaaactgaaatcagtccagttatgctgtgaaaaagcatactggacttttgttatggctaaagcaaactcttcattttctgaagtgcaaattgcccgtcgtattaaagaggggcgtggccaagggcatggtaaagactatattcgcggcgttgtgacaatttaccgaacaactccgcggccgggaagccgatctcggcttgaacgaattgttaggtggcggtacttgggtcgatatcaaagtgcatcacttcttcccgtatgcccaactttgtatagagagccactgcgggatcgtcaccgtaatctgcttgcacgtagatcacataagcaccaagcgcgttggcctcatgcttgaggagattgatgagcgcggtggcaatgccctgcctccggtgctcgccggagactgcgagatcatagatatagatctcactacgcggctgctcaaacttgggcagaacgtaagccgcgagagcgccaacaaccgcttcttggtcgaaggcagcaagcgcgatgaatgtcttactacggagcaagttcccgaggtaatcggagtccggctgatgttgggagtaggtggctacgtctccgaactcacgaccgaaaagatcaagagcagcccgcatggatttgacttggtcagggccgagcctacatgtgcgaatgatgcccatacttgagccacctaactttgttttagggcgactgccctgctgcgtaacatcgttgctgctgcgtaacatcgttgctgctccataacatcaaacatcgacccacggcgtaacgcgcttgctgcttggatgcccgaggcatagactgtacaaaaaaacagtcataacaagccatgaaaaccgccactgcgccgttaccaccgctgcgttcggtcaaggttctggaccagttgcgtgagcgcatacgctacttgcattacagtttacgaaccgaacaggcttatgtcaactgggtttgtgccttcatccgtttccacggtgtgcgtcacccggcaaccttgggcagcagcgaagtcgaggcatttctgtcctggctggcgaacgagcgcaaggtttcggtctccacgcatcgtcaggcattggcggccttgctgttcttctacggcaaggtgctgtgcacggatctgcccttgcttcaggagatcggtagacctcggccgtcgcggcgcttgccggtggtgctgaccccggatgaagtggttcgcatcctcggttttctggaaggcgagcatcgtttgttcgcccaggactctagctatagttctagtggttggctacagctttgtttgtactatcaacaggttgaactgctgatcaacagatcctctacgcggccgcggtaccataacttcgtatagcatacattatacgaagttatctggtttaaacgtacccgtagtggctatggcagggcttgccgccccgacgttggctgcgagccctgggccttcacccgaacttgggggttggggtggggaaaaggaagaaacgcgggcgtattggtcccaatggggtctcggtggggtatcgacagagtgccagccctgggaccgaaccccgcgtttatgaacaaacgacccaacacccgtgcgttttattctgtctttttattgccgtcatagcgcgggttccttccggtattgtctccttccgtgtttcagttagcctcccccatctcccggtaccgcatgctatgcatcagctgctagcttagcgagcgtccacagcctggggaccgtaacgggagtgagcgggcaggttcacacgggtctgcttcagctcagggggcaggccagcgtagtacttgtccaggtgacgcagcaggggggggtccagctggtgacgcaggcagaattccttcacagcgttgtacaggccgtagaacagggtgataccctcgggagcagcagcggtggacacgggcagacgcacagcacggttggtacgggtagcctcgttacggatagccaccaccacgttgaacagggaggggggcaccagctcgaaacccagcacgtgttcggtgaagatggaacgaccgtaggacagacgagtcaggtcgtaaccacggcacaggtcgtccacgcaagtgtacacagcgggggaaccgtcgccgcactcggagtaaccgcgcatcacggtcatccaacggggagcggtgtcggaggacagcagggtcagcagagcacgcagctggtcggggttgttgtacagcagggccagggtgtccaggaaagcgtcgtccagcagcacggagttagcagcctcgggggtcacgggacggtaacggatcagctgggacaggggaccgtccctacgggtcacgttgaccaggggacgcagccaggactcgtacttgtcgccctggaacacctctcccagcaggcaacgacgggtcagctcggggcactcagcgggcaccttctcagccacggtgggagccacggacacggtagcggaggacacgatgggcagcagcaggcagcaccacagcagagccacgggaccgggggagaaggagaaaccgcagtcgggacgacggcacatggtggctcgagatcccgggtgatcaagtcttcgtcgagtgattgtaaataaaatgtaatttacagtatagtattttaattaatatacaaatgatttgataataattcttatttaactataatatattgtgttgggttgaattaaaggtccgtatactagtatcgattcgcgacctactccggaatattaatagatcatggagataattaaaatgataaccatctcgcaaataaataagtattttactgttttcgtaacagttttgtaataaaaaaacctataaatattccggattattcataccgtcccaccatcgggcgcggatccgccaccatgtcccccaagaacctgacccccttcctgaccgctctgtggctgctgctgggccactcccgtgtgcctcgtgtgcgtgctgaggaatgctgcgagttcatcaacgtgaaccacccccccgagcgctgctacgacttcaagatgtgcaaccgtttcaccgtggctctgcgttgccccgacggcgaagtgtgctactcccccgaaaagaccgctgagatccgtggtatcgtgaccaccatgacccactccctgacccgtcaggtggtgcacaacaagctgacctcttgcaactacaaccccctgtacctcgaggctgacggtcgtatccgttgcggcaaggtcaacgacaaggctcagtacctgctgggtgctgctggttccgtgccctaccgttggatcaacctcgagtacgacaagatcacccgtatcgtgggcctggaccagtacctcgagtccgtgaagaagcacaagcgtctggacgtgtgccgtgctaagatgggttacatgctgcagtaaaagcttgtcgagaagtactagaggatcataatcagccataccacatttgtagaggttttacttgctttaaaaaacctcccacacctccccctgaacctgaaacataaaatgaatgcaattgttgttgttaacttgtttattgcagcttataatggttacaaataaagcaatagcatcacaaatttcacaaataaagcatttttttcactgcattctagttgtggtttgtccaaactcatcaatgtatcttatcatgtctggatctgatcactgcttgagcctagaagatccggctgctaacaaagcccgaaaggaagctgagttggctgctgtggctagctttgtttaactttaagaaggagatacatctagaccggaatattaatagatcatggagataattaaaatgataaccatctcgcaaataaataagtattttactgttttcgtaacagttttgtaataaaaaaacctataaatattccggattattcataccgtcccaccatcgggcgcggatccgccaccatgctgcgtctgctgctgcgtcaccacttccactgcctgctgctgtgcgctgtgtgggctaccccctgcctggcttccccttggtccaccctgaccgctaaccagaacccctccccaccctggtccaagctgacctactccaagccccacgacgctgctaccttctactgccccttcctgtacccatccccccctcgttccccactgcagttctccggtttccagcgtgtgctgaccggtcccgagtgccgtaacgagactctgtacctgctgtacaaccgcgagggccagaccctggtcgagaggtcctccacctgggtcaagaaggtcatctggtacttgtccggtcgtaaccagaccatcctgcagcgtatgccccgtaccgcttccaagccctccgacggcaacgtgcagatctccgtcgaggacgctaagatcttcggtgctcacatggtgcccaagcagaccaagctgctgcgtttcgtggtcaacgacggcacccgttaccagatgtgcgtgatgaagctcgagtcctgggctcacgtgttccgtgactactccgtgtccttccaagtgcgcctgaccttcaccgaggctaacaaccagacctacaccttctgcacccaccccaacctgatcgtgtaaaagcttgtcgagaagtactagaggatcataatcagccataccacatttgtagaggttttacttgctttaaaaaacctcccacacctccccctgaacctgaaacataaaatgaatgcaattgttgttgttaacttgtttattgcagcttataatggttacaaataaagcaatagcatcacaaatttcacaaataaagcatttttttcactgcattctagttgtggtttgtccaaactcatcaatgtatcttatcatgtctggatctgatcactgcttgagcctagaagatccggctgctaacaaagcccgaaaggaagctgagttggctgctgggtgcctaatgagtgagctaactcacattaattgcccggaatattaatagatcatggagataattaaaatgataaccatctcgcaaataaataagtattttactgttttcgtaacagttttgtaataaaaaaacctataaatattccggattattcataccgtcccaccatcgggcgcggatccgccaccatgcgtctgtgccgtgtgtggctgtccgtgtgcctgtgcgctgtggtgctgggccagtgccagcgtgaaaccgctgagaagaacgactactaccgtgtgccccactactgggacgcttgctcccgtgctctgcccgaccagacccgttacaagtacgtcgagcagctggtggacctgaccctgaactaccactacgacgcttcccacggcctggacaacttcgacgtgctgaagcgtatcaacgtgaccgaggtgtccctgctgatctccgacttccgtcgtcagaaccgtcgtggtggcaccaacaagcgtaccaccttcaacgctgctggttccctggctccccacgctcgttccctcgagttctccgtgcgtctgttcgctaactaaaagcttgtcgagaagtactagaggatcataatcagccataccacatttgtagaggttttacttgctttaaaaaacctcccacacctccccctgaacctgaaacataaaatgaatgcaattgttgttgttaacttgtttattgcagcttataatggttacaaataaagcaatagcatcacaaatttcacaaataaagcatttttttcactgcattctagttgtggtttgtccaaactcatcaatgtatcttatcatgtctggatctgatcactgcttgagcctagaagatccggctgctaacaaagcccgaaaggaagctgagttggctgctgccaccgctgagcaataactatcataacccccggaatattaatagatcatggagataattaaaatgataaccatctcgcaaataaataagtattttactgttttcgtaacagttttgtaataaaaaaacctataaatattccggattattcataccgtcccaccatcgggcgcggatcccggtccgaagcgcgcggaattcaaaggcctaccgtcgacgccaccatggaatcccgtatctggtgcctggtcgtgtgcgtgaacctgtgcatcgtgtgcctgggtgctgctgtgtcctcctcctccacccgtggcacctccgctacccactcccaccactcctcccacaccacctccgccgctcactcccgttccggttccgtgtcccagcgtgtgacctcctcccagaccgtgtcccacggtgtcaacgagactatctacaacaccaccctgaagtacggcgacgtcgtgggtgtcaacaccaccaagtacccctaccgtgtgtgctccatggctcagggcaccgacctgatccgtttcgagcgtaacatcgtgtgcacctccatgaagcccatcaacgaggacctggacgagggtatcatggtggtgtacaagcgcaacatcgtggctcacaccttcaaggtccgcgtgtaccagaaggtgctgaccttccgtcgttcctacgcttacatccacaccacttacctgctgggttccaacaccgagtacgtggcccctcccatgtgggagatccaccacatcaactcccactcccagtgctactcctcttactcccgtgtgatcgctggcaccgtgttcgtggcttaccaccgtgactcctacgagaacaagaccatgcagctgatgcccgacgactactccaacacccactccacccgttacgtgaccgtgaaggaccagtggcactcccgtggttccacctggctgtaccgtgaaacctgcaacctgaactgcatggtcaccatcaccaccgctcgttccaagtacccttaccacttcttcgctacctccaccggcgacgtggtggacatctcccccttctacaacggtactaaccgtaacgcttcctacttcggcgagaacgctgacaagttcttcatcttccccaactacaccatcgtgtccgacttcggtcgtcccaactccgctctggaaacccaccgtctggtggctttcttggagcgtgctgactccgtgatctcctgggacatccaggacgagaagaacgtgacctgccagctgaccttctgggaggcttccgagcgtaccatccgttccgaggctgaggactcctaccacttctccagcgctaagatgaccgctaccttcctgtccaagaaacaagaggtcaacatgtccgactccgccctggactgcgtgcgtgacgaggctatcaacaagctgcagcagatcttcaacacctcctacaaccagacctacgagaagtacggaaacgtgtccgtgttcgagactaccggtggcctggtggtgttctggcagggtatcaagcagaagtccctggtcgagctggaacgtctggctaaccgttcctccctgaacctgacccacaaccgtaccaagcgttccaccgacggcaacaacgctactcacctgtccaacatggaatccgtgcacaacctggtgtacgctcagctgcagttcacctacgacaccctgcgcggttacatcaaccgtgctctggctcagatcgctgaggcttggtgcgtggaccagcgtcgtaccctggaagtgttcaaggaactgtccaagatcaacccctccgctatcctgtccgccatctacaacaagcctatcgctgctcgtttcatgggcgacgtgctgggcctggcttcctgcgtgaccatcaaccagacttccgtgaaggtgctgcgtgacatgaacgtgaaggaatcccccggtcgttgctactcccgtcccgtggtcatcttcaacttcgctaactcctcctacgtgcagtacggccagctgggcgaggacaacgagatcctgctgggcaaccaccgtaccgaggaatgccagctgccctccctgaagatcttcatcgctggcaactccgcttacgaatacgtggactacctgttcaagcgcatgatcgacctgtcctccatctctaccgtggactccatgatcgctctggacatcgaccccctggaaaacaccgacttccgtgtgctggaactgtactcccagaaggaactgcgttccatcaacgtgttcgacctggaagagatcatgcgcgagttcaactcctacaagcagcgtgttaagtacgtcgaggacaaggtggtggaccccctgcccccctacctgaagggactggacgacctgatgtccggcctgggagctgccggcaaggctgtgggtgtcgctatcggtgctgtgggtggtgctgtggcttccgtggtcgagggtgtcgccaccttcctgaagaaccccttcggtgctttcaccatcatcctggtggctatcgctgtggtcatcatcatctacctgatctacacccgtcagcgtcgtctgtgcatgcagcccctgcagaacctgttcccctacctggtgtccgctgacggtactaccgtgacctccggcaacaccaaggacacctccctgcaggctcccccatcctacgaggaatccgtctacaactccggtcgcaagggtcccggtcccccttcctccgacgcttctaccgctgctcccccatacaccaacgagcaggcttaccagatgctgctggctctcgtgcgtctggacgctgagcagcgtgcacagcagaacggcaccgactccctggacggccagaccggaacccaggacaagggccagaagcccaacctgctggaccgtctgcgtcaccgcaagaacggttaccgtcacctgaaggactccgacgaggaagagaacgtctaaggcgcgccaagcttgtcgagaagtactagagatcataatcagccataccacatttgtagaggttttacttgctttaaaaaacctcccacacctccccctgaacctgaaacataaaatgaatgcaattgttgttgttaacttgtttattgcagcttataatggttacaaataaagcaatagcatcacaaatttcacaaataaagcatttttttcactgcattctagttgtggtttgtccaaactcatcaatgtatcttatcatgtctggatctgatcactgcttgagcctagaagatccggctgctaacaaagcccgaaaggaagctgggaatattaatagatcatggagataattaaaatgataaccatctcgcaaataaataagtattttactgttttcgtaacagttttgtaataaaaaaacctataaatattccggattattcataccgtcccaccatcgggcgcggatccgccaccatgcgtcccggcctgccctcctacctgatcgtgctggctgtgtgcctgctgtcccacctcctgtcctcccgttacggtgctgaggctatctccgagcccctggacaaggctttccacctcctgctgaacacctacggtcgtcctatccgtttcctgcgcgagaacaccacccagtgcacctacaactcctccctgcgcaactccaccgtcgtccgcgagaacgctatctccttcaacttcttccagtcctacaaccagtactacgtgttccacatgccccgttgcctgttcgctggtcccctggctgagcagttcctgaaccaggtggacctgaccgagactctcgagcgttaccagcagcgtctgaacacttacgctctggtgtccaaggacctggcttcctaccgttccttcagccagcagctgaaggctcaggactccctgggcgagcagcccaccactgtgcctccccctatcgacctgtccatcccccacgtgtggatgcccccccagaccactcctcacggctggaccgagtcccacaccacctccggactgcaccgtccccacttcaaccagacctgcatcctgttcgacggtcacgacctgctgttctccaccgtgaccccctgcctgcaccagggcttctacctcatcgacgagctgcgttacgtgaagatcaccctgaccgaggatttcttcgtggtcaccgtgtccatcgacgacgacacccccatgctgctgatcttcggtcacctcccccgtgtgctgttcaaggctccctaccagcgtgacaacttcatcctgcgtcagaccgagaagcacgagctgctggtgctggtcaagaaggaccagctgaaccgtcactcttacctgaaggaccccgacttcctggacgctgctctggacttcaactacctggacctgtccgctctgctgaggaactccttccaccgttacgctgtggacgtgctgaagtccggtcgttgccagatgctggaccgtcgtaccgtcgagatggctttcgcttacgccctggctctgttcgctgctgctcgtcaagaagaggctggcgctcaggtgtccgtgccccgtgctctggaccgtcaggctgctctgctgcagatccaagagttcatgatcacttgcctgtcccagaccccccctcgtaccaccctgctgctgtaccccaccgctgtggacctggctaagcgtgctctgtggacccccaaccagatcaccgacatcacctccctcgtgcgtctggtgtacatcctgtccaagcagaaccagcagcacctgatcccccagtgggctctgcgtcagatcgctgacttcgctctgaagctgcacaagacccacctggcttcattcctcagcgctttcgctcgccaagagctgtacctgatgggttccctggtgcactccatgctggtgcacaccaccgagcgtcgcgagatcttcatcgtggaaaccggcctgtgctccctggccgagctgtcccacttcacccagctgctggctcacccccaccacgagtacctgtccgacctgtacaccccctgctcctcttccggtcgtcgtgaccactccctggaacgtctgacccgtctgttccccgacgctaccgtgcctaccaccgtgcctgctgctctgtccatcctgtctaccatgcagccctccaccctggaaaccttccccgacctgttctgcctgcctctgggcgagtccttctccgctctgaccgtgtccgagcacgtgtcctacgtggtcaccaaccagtacctgatcaagggcatctcctaccccgtgtccaccaccgtcgtgggccagtccctgatcatcacccagaccgactcccagaccaagtgcgagctgacccgtaacatgcacaccactcactccatcaccgctgctctgaacatctccctcgagaactgcgctttctgccagtccgctctgttggagtacgacgacactcagggtgtcatcaacatcatgtacatgcacgactccgacgacgtgctgttcgctctggacccctacaacgaggtggtggtgtcctccccccgtacccactacctgatgctgctgaagaacggcaccgtgctggaagtgaccgacgtggtggtggacgctaccgaccgtctgctgatgatgtccgtgtacgctctgtccgctatcatcggcatctacctgctgtaccgtatgctgaagacctgccagctgttgaattttgaccttcttaagcttgcgggagacgtcgagtccaaccctgggcccatgggtgctcgtgcttcagtgctgtccggtggcgagctggacaagtgggagaagatccgtctgcgtcccggtggcaagaagcagtacaagctgaagcacatcgtgtgggcttcccgcgagctggaacgtttcgctgtgaaccccggcctgctggaaacctccgagggttgccgtcagatcctgggccagctgcagccctccctgcagaccggttccgaggaactgcgttccctgtacaacactatcgctgtgctgtactgcgtgcaccagcgtatcgacgtgaaggacaccaaggaagctctggacaagatcgaggaagaacagaacaagtccaagaagaaggcccagcaggctgctgctgacaccggcaacaactcccaggtgtcccagaactaccccatcgtgcagaacctgcagggccagatggtgcaccaggctatctccccccgtaccctgaacgcttgggtcaaggtggtggaagagaaggctttcagccccgaagtgatccccatgttctccgctctgtccgagggtgctaccccccaggacctgaacaccatgctgaacaccgtgggtggtcaccaggctgctatgcagatgctgaaggaaaccatcaacgaagaggctgctgagtgggaccgtctgcaccccgtgcacgctggtcctatcgctcccggacagatgcgcgagccccgtggttccgacatcgctggaaccacctccaccctgcaagagcagatcggctggatgacccacaacccccccatccccgtgggcgagatctacaagcgttggatcatcctgggcctgaacaagatcgtgcgtatgtactcccccacctccatcctggacatccgtcagggtcccaaggaacccttccgtgactacgtggaccgtttctacaagaccctgcgtgccgagcaggcttcccaagaggtcaagaactggatgaccgagactctgctggtgcagaacgctaaccccgactgcaagaccatcctgaaggctctgggtcccggtgctaccctggaagagatgatgaccgcttgccagggtgtcggtggtcccggtcacaaggctcgtgtgctggctgaggctatgtcccaagtgaccaaccccgctaccatcatgatccagaagggcaacttccgtaaccagcgcaagaccgtgaagtgcttcaactgcggcaaggaaggccacatcgctaagaactgccgtgctccccgcaagaagggctgctggaagtgcggaaaggaaggacaccagatgaaggactgcaccgagcgtcaggctaacttcctgggcaagatctggccctcccacaagggtcgtcccggcaacttcctgcagtcccgtcccgagcccaccgctcccccagaggaatccttccgtttcggcgaggaaaccaccaccccatcccagaagcaagagcccatcgacaaggaactgtaccccctggcttccctgcgctccctgttcggttccgacccatcctcccagtaaggcgcccaagcttgtcgagaagtactagaggatcataatcagccataccacatttgtagaggttttacttgctttaaaaaacctcccacacctccccctgaacctgaaacataaaatgaatgcaattgttgttgttaacttgtttattgcagcttataatggttacaaataaagcaatagcatcacaaatttcacaaataaagcatttttttcactgcattctagttgtggtttgtccaaactcatcaatgtatcttatcatgtctggatctgatcactgcttgagcctagaagatccggctgctaacaaagcccgaaaggaagctgagttggctgctgccaccgctgagcaataactatcataacccctaggagatccgaaccagataagtgaaatctagttccaaactattttgtcatttttaattttcgtattagcttacgacgctacacccagttcccatctattttgtcactcttccctaaataatccttaaaaactccatttccacccctcccagttcccaactattttgtccgcccaca

SEQ ID NO: 29 - DNA, 14218 bp, Artificial Sequence
  Synthetic construct
ttgttccagtttggaacaagagtccactattaaagaacgtggactccaacgtcaaagggcgaaaaaccgtctatcagggcgatggcccactacgtgaaccatcaccctaatcaagttttttggggtcgaggtgccgtaaagcactaaatcggaaccctaaagggagcccccgatttagagcttgacggggaaagccggcgaacgtggcgagaaaggaagggaagaaagcgaaaggagcgggcgctagggcgctggcaagtgtagcggtcacgctgcgcgtaaccaccacacccgccgcgcttaatgcgccgctacagggcgcgtccattcgccattcaggctgcgcaactgttgggaagggcgatcggtgcgggcctcttcgctattacgccagctggcgaaagggggatgtgctgcaaggcgattaagttgggtaacgccagggttttcccagtcacgacgttgtaaaacgacggccagtgcatagaccagccgcgtaacctggcaaaatcggttacggttgagtaataaatggatgccctgcgtaagcgggtgtgggcggacaataaagtcttaaactgaacaaaatagatctaaactatgacaataaagtcttaaactagacagaatagttgtaaactgaaatcagtccagttatgctgtgaaaaagcatactggacttttgttatggctaaagcaaactcttcattttctgaagtgcaaattgcccgtcgtattaaagaggggcgtggccaagggcatggtaaagactatattcgcggcgttgtgacaatttaccgaacaactccgcggccgggaagccgatctcggcttgaacgaattgttaggtggcggtacttgggtcgatatcaaagtgcatcacttcttcccgtatgcccaactttgtatagagagccactgcgggatcgtcaccgtaatctgcttgcacgtagatcacataagcaccaagcgcgttggcctcatgcttgaggagattgatgagcgcggtggcaatgccctgcctccggtgctcgccggagactgcgagatcatagatatagatctcactacgcggctgctcaaacttgggcagaacgtaagccgcgagagcgccaacaaccgcttcttggtcgaaggcagcaagcgcgatgaatgtcttactacggagcaagttcccgaggtaatcggagtccggctgatgttgggagtaggtggctacgtctccgaactcacgaccgaaaagatcaagagcagcccgcatggatttgacttggtcagggccgagcctacatgtgcgaatgatgcccatacttgagccacctaactttgttttagggcgactgccctgctgcgtaacatcgttgctgctgcgtaacatcgttgctgctccataacatcaaacatcgacccacggcgtaacgcgcttgctgcttggatgcccgaggcatagactgtacaaaaaaacagtcataacaagccatgaaaaccgccactgcgccgttaccaccgctgcgttcggtcaaggttctggaccagttgcgtgagcgcatacgctacttgcattacagtttacgaaccgaacaggcttatgtcaactgggtttgtgccttcatccgtttccacggtgtgcgtcacccggcaaccttgggcagcagcgaagtcgaggcatttctgtcctggctggcgaacgagcgcaaggtttcggtctccacgcatcgtcaggcattggcggccttgctgttcttctacggcaaggtgctgtgcacggatctgcccttgcttcaggagatcggtagacctcggccgtcgcggcgcttgccggtggtgctgaccccggatgaagtggttcgcatcctcggttttctggaaggcgagcatcgtttgttcgcccaggactctagctatagttctagtggttggctacagctttgtttgtactatcaacaggttgaactgctgatcaacagatcctctacgcggccgcggtaccataacttcgtatagcatacattatacgaagttatctggtttaaacgtacccgtagtggctatggcagggcttgccgccccgacgttggctgcgagccctgggccttcacccgaacttgggggttggggtggggaaaaggaagaaacgcgggcgtattggtcccaatggggtctcggtggggtatcgacagagtgccagccctgggaccgaaccccgcgtttatgaacaaacgacccaacacccgtgcgttttattctgtctttttattgccgtcatagcgcgggttccttccggtattgtctccttccgtgtttcagttagcctcccccatctcccggtaccgcatgctatgcatcagctgctagcttagcgagcgtccacagcctggggaccgtaacgggagtgagcgggcaggttcacacgggtctgcttcagctcagggggcaggccagcgtagtacttgtccaggtgacgcagcaggggggggtccagctggtgacgcaggcagaattccttcacagcgttgtacaggccgtagaacagggtgataccctcgggagcagcagcggtggacacgggcagacgcacagcacggttggtacgggtagcctcgttacggatagccaccaccacgttgaacagggaggggggcaccagctcgaaacccagcacgtgttcggtgaagatggaacgaccgtaggacagacgagtcaggtcgtaaccacggcacaggtcgtccacgcaagtgtacacagcgggggaaccgtcgccgcactcggagtaaccgcgcatcacggtcatccaacggggagcggtgtcggaggacagcagggtcagcagagcacgcagctggtcggggttgttgtacagcagggccagggtgtccaggaaagcgtcgtccagcagcacggagttagcagcctcgggggtcacgggacggtaacggatcagctgggacaggggaccgtccctacgggtcacgttgaccaggggacgcagccaggactcgtacttgtcgccctggaacacctctcccagcaggcaacgacgggtcagctcggggcactcagcgggcaccttctcagccacggtgggagccacggacacggtagcggaggacacgatgggcagcagcaggcagcaccacagcagagccacgggaccgggggagaaggagaaaccgcagtcgggacgacggcacatggtggctcgagatcccgggtgatcaagtcttcgtcgagtgattgtaaataaaatgtaatttacagtatagtattttaattaatatacaaatgatttgataataattcttatttaactataatatattgtgttgggttgaattaaaggtccgtatactagtatcgattcgcgacctactccggaatattaatagatcatggagataattaaaatgataaccatctcgcaaataaataagtattttactgttttcgtaacagttttgtaataaaaaaacctataaatattccggattattcataccgtcccaccatcgggcgcggatccgccaccatgaactccaaggacctgacccccttcctgaccaccctgtggctgctgctggaccactcccgtgtgcctcgtgtgcgtgctgaggaatgctgcgaagtgatcaacgtgaaccacccccccgagcgctgctacgacttcaagatgtgcaacctgttcaccgtggctctgcgttgccccgacggcgaagtgtgctactcccccgaaaagaccgctgagatccgtggtatcgtgaccaccatgacccactccctgacccgtcaagtgatccacaacaagctgaccagctgcaactacaaccccctgtacctcgaggctgacggtcgtatccgttgcggcaaggtgtccgacaaggctcagtacctgctgggtgctgctggttccgtgccctaccgttggatcaacctcgagtacgacaagatcacccgtatcgtgggcctggaccagtacctcgagtccgtgaagaagcacaagcgtctggacgtgtgccgtgctaagatgggttacatgctgcagtaaaagcttgtcgagaagtactagaggatcataatcagccataccacatttgtagaggttttacttgctttaaaaaacctcccacacctccccctgaacctgaaacataaaatgaatgcaattgttgttgttaacttgtttattgcagcttataatggttacaaataaagcaatagcatcacaaatttcacaaataaagcatttttttcactgcattctagttgtggtttgtccaaactcatcaatgtatcttatcatgtctggatctgatcactgcttgagcctagaagatccggctgctaacaaagcccgaaaggaagctgagttggctgctgtggctagctttgtttaactttaagaaggagatacatctagaccggaatattaatagatcatggagataattaaaatgataaccatctcgcaaataaataagtattttactgttttcgtaacagttttgtaataaaaaaacctataaatattccggattattcataccgtcccaccatcgggcgcggatccgccaccatgctgcgtctgctgctgcgtcaccacttccactgcctgctgctgtgcgctgtgtgggctaccccctgcctggcttccccttggtccaccctgaccgctaaccagaacccctccccaccctggtccaagctgacctactccaagccccacgacgctgctaccttctactgccccttcctgtacccatccccccctcgttccccactgcagttctccggtttccagcgtgtgctgaccggtcccgagtgccgtaacgagactctgtacctgctgtacaaccgcgagggccagaccctggtcgagaggtcctccacctgggtcaagaaggtcatctggtacttgtccggtcgtaaccagaccatcctgcagcgtatgccccgtaccgcttccaagccctccgacggcaacgtgcagatctccgtcgaggacgctaagatcttcggtgctcacatggtgcccaagcagaccaagctgctgcgtttcgtggtcaacgacggcacccgttaccagatgtgcgtgatgaagctcgagtcctgggctcacgtgttccgtgactactccgtgtccttccaagtgcgcctgaccttcaccgaggctaacaaccagacctacaccttctgcacccaccccaacctgatcgtgtaaaagcttgtcgagaagtactagaggatcataatcagccataccacatttgtagaggttttacttgctttaaaaaacctcccacacctccccctgaacctgaaacataaaatgaatgcaattgttgttgttaacttgtttattgcagcttataatggttacaaataaagcaatagcatcacaaatttcacaaataaagcatttttttcactgcattctagttgtggtttgtccaaactcatcaatgtatcttatcatgtctggatctgatcactgcttgagcctagaagatccggctgctaacaaagcccgaaaggaagctgagttggctgctgggtgcctaatgagtgagctaactcacattaattgcccggaatattaatagatcatggagataattaaaatgataaccatctcgcaaataaataagtattttactgttttcgtaacagttttgtaataaaaaaacctataaatattccggattattcataccgtcccaccatcgggcgcggatccgccaccatgcgtctgtgccgtgtgtggctgtccgtgtgcctgtgcgctgtggtgctgggccagtgccagcgtgaaaccgctgagaagaacgactactaccgtgtgccccactactgggacgcttgctcccgtgctctgcccgaccagacccgttacaagtacgtcgagcagctggtggacctgaccctgaactaccactacgacgcttcccacggcctggacaacttcgacgtgctgaagcgtatcaacgtgaccgaggtgtccctgctgatctccgacttccgtcgtcagaaccgtcgtggtggcaccaacaagcgtaccaccttcaacgctgctggttccctggctccccacgctcgttccctcgagttctccgtgcgtctgttcgctaactaaaagcttgtcgagaagtactagaggatcataatcagccataccacatttgtagaggttttacttgctttaaaaaacctcccacacctccccctgaacctgaaacataaaatgaatgcaattgttgttgttaacttgtttattgcagcttataatggttacaaataaagcaatagcatcacaaatttcacaaataaagcatttttttcactgcattctagttgtggtttgtccaaactcatcaatgtatcttatcatgtctggatctgatcactgcttgagcctagaagatccggctgctaacaaagcccgaaaggaagctgagttggctgctgccaccgctgagcaataactatcataacccccggaatattaatagatcatggagataattaaaatgataaccatctcgcaaataaataagtattttactgttttcgtaacagttttgtaataaaaaaacctataaatattccggattattcataccgtcccaccatcgggcgcggatcccggtccgaagcgcgcggaattcaaaggcctaccgtcgacgccaccatggaatcccgtatctggtgcctggtcgtgtgcgtgaacctgtgcatcgtgtgcctgggtgctgctgtgtcctcctcctccacccgtggcacctccgctacccactcccaccactcctcccacaccacctccgccgctcactcccgttccggttccgtgtcccagcgtgtgacctcctcccagaccgtgtcccacggtgtcaacgagactatctacaacaccaccctgaagtacggcgacgtcgtgggtgtcaacaccaccaagtacccctaccgtgtgtgctccatggctcagggcaccgacctgatccgtttcgagcgtaacatcgtgtgcacctccatgaagcccatcaacgaggacctggacgagggtatcatggtggtgtacaagcgcaacatcgtggctcacaccttcaaggtccgcgtgtaccagaaggtgctgaccttccgtcgttcctacgcttacatccacaccacttacctgctgggttccaacaccgagtacgtggcccctcccatgtgggagatccaccacatcaactcccactcccagtgctactcctcttactcccgtgtgatcgctggcaccgtgttcgtggcttaccaccgtgactcctacgagaacaagaccatgcagctgatgcccgacgactactccaacacccactccacccgttacgtgaccgtgaaggaccagtggcactcccgtggttccacctggctgtaccgtgaaacctgcaacctgaactgcatggtcaccatcaccaccgctcgttccaagtacccttaccacttcttcgctacctccaccggcgacgtggtggacatctcccccttctacaacggtactaaccgtaacgcttcctacttcggcgagaacgctgacaagttcttcatcttccccaactacaccatcgtgtccgacttcggtcgtcccaactccgctctggaaacccaccgtctggtggctttcttggagcgtgctgactccgtgatctcctgggacatccaggacgagaagaacgtgacctgccagctgaccttctgggaggcttccgagcgtaccatccgttccgaggctgaggactcctaccacttctccagcgctaagatgaccgctaccttcctgtccaagaaacaagaggtcaacatgtccgactccgccctggactgcgtgcgtgacgaggctatcaacaagctgcagcagatcttcaacacctcctacaaccagacctacgagaagtacggaaacgtgtccgtgttcgagactaccggtggcctggtggtgttctggcagggtatcaagcagaagtccctggtcgagctggaacgtctggctaaccgttcctccctgaacctgacccacaaccgtaccaagcgttccaccgacggcaacaacgctactcacctgtccaacatggaatccgtgcacaacctggtgtacgctcagctgcagttcacctacgacaccctgcgcggttacatcaaccgtgctctggctcagatcgctgaggcttggtgcgtggaccagcgtcgtaccctggaagtgttcaaggaactgtccaagatcaacccctccgctatcctgtccgccatctacaacaagcctatcgctgctcgtttcatgggcgacgtgctgggcctggcttcctgcgtgaccatcaaccagacttccgtgaaggtgctgcgtgacatgaacgtgaaggaatcccccggtcgttgctactcccgtcccgtggtcatcttcaacttcgctaactcctcctacgtgcagtacggccagctgggcgaggacaacgagatcctgctgggcaaccaccgtaccgaggaatgccagctgccctccctgaagatcttcatcgctggcaactccgcttacgaatacgtggactacctgttcaagcgcatgatcgacctgtcctccatctctaccgtggactccatgatcgctctggacatcgaccccctggaaaacaccgacttccgtgtgctggaactgtactcccagaaggaactgcgttccatcaacgtgttcgacctggaagagatcatgcgcgagttcaactcctacaagcagcgtgttaagtacgtcgaggacaaggtggtggaccccctgcccccctacctgaagggactggacgacctgatgtccggcctgggagctgccggcaaggctgtgggtgtcgctatcggtgctgtgggtggtgctgtggcttccgtggtcgagggtgtcgccaccttcctgaagaaccccttcggtgctttcaccatcatcctggtggctatcgctgtggtcatcatcatctacctgatctacacccgtcagcgtcgtctgtgcatgcagcccctgcagaacctgttcccctacctggtgtccgctgacggtactaccgtgacctccggcaacaccaaggacacctccctgcaggctcccccatcctacgaggaatccgtctacaactccggtcgcaagggtcccggtcccccttcctccgacgcttctaccgctgctcccccatacaccaacgagcaggcttaccagatgctgctggctctcgtgcgtctggacgctgagcagcgtgcacagcagaacggcaccgactccctggacggccagaccggaacccaggacaagggccagaagcccaacctgctggaccgtctgcgtcaccgcaagaacggttaccgtcacctgaaggactccgacgaggaagagaacgtctaaggcgcgccaagcttgtcgagaagtactagagatcataatcagccataccacatttgtagaggttttacttgctttaaaaaacctcccacacctccccctgaacctgaaacataaaatgaatgcaattgttgttgttaacttgtttattgcagcttataatggttacaaataaagcaatagcatcacaaatttcacaaataaagcatttttttcactgcattctagttgtggtttgtccaaactcatcaatgtatcttatcatgtctggatctgatcactgcttgagcctagaagatccggctgctaacaaagcccgaaaggaagctgggaatattaatagatcatggagataattaaaatgataaccatctcgcaaataaataagtattttactgttttcgtaacagttttgtaataaaaaaacctataaatattccggattattcataccgtcccaccatcgggcgcggatccgccaccatgcgtcccggcctgccctcctacctgatcgtgctggctgtgtgcctgctgtcccacctcctgtcctcccgttacggtgctgaggctatctccgagcccctggacaaggctttccacctcctgctgaacacctacggtcgtcctatccgtttcctgcgcgagaacaccacccagtgcacctacaactcctccctgcgcaactccaccgtcgtccgcgagaacgctatctccttcaacttcttccagtcctacaaccagtactacgtgttccacatgccccgttgcctgttcgctggtcccctggctgagcagttcctgaaccaggtggacctgaccgagactctcgagcgttaccagcagcgtctgaacacttacgctctggtgtccaaggacctggcttcctaccgttccttcagccagcagctgaaggctcaggactccctgggcgagcagcccaccactgtgcctccccctatcgacctgtccatcccccacgtgtggatgcccccccagaccactcctcacggctggaccgagtcccacaccacctccggactgcaccgtccccacttcaaccagacctgcatcctgttcgacggtcacgacctgctgttctccaccgtgaccccctgcctgcaccagggcttctacctcatcgacgagctgcgttacgtgaagatcaccctgaccgaggatttcttcgtggtcaccgtgtccatcgacgacgacacccccatgctgctgatcttcggtcacctcccccgtgtgctgttcaaggctccctaccagcgtgacaacttcatcctgcgtcagaccgagaagcacgagctgctggtgctggtcaagaaggaccagctgaaccgtcactcttacctgaaggaccccgacttcctggacgctgctctggacttcaactacctggacctgtccgctctgctgaggaactccttccaccgttacgctgtggacgtgctgaagtccggtcgttgccagatgctggaccgtcgtaccgtcgagatggctttcgcttacgccctggctctgttcgctgctgctcgtcaagaagaggctggcgctcaggtgtccgtgccccgtgctctggaccgtcaggctgctctgctgcagatccaagagttcatgatcacttgcctgtcccagaccccccctcgtaccaccctgctgctgtaccccaccgctgtggacctggctaagcgtgctctgtggacccccaaccagatcaccgacatcacctccctcgtgcgtctggtgtacatcctgtccaagcagaaccagcagcacctgatcccccagtgggctctgcgtcagatcgctgacttcgctctgaagctgcacaagacccacctggcttcattcctcagcgctttcgctcgccaagagctgtacctgatgggttccctggtgcactccatgctggtgcacaccaccgagcgtcgcgagatcttcatcgtggaaaccggcctgtgctccctggccgagctgtcccacttcacccagctgctggctcacccccaccacgagtacctgtccgacctgtacaccccctgctcctcttccggtcgtcgtgaccactccctggaacgtctgacccgtctgttccccgacgctaccgtgcctaccaccgtgcctgctgctctgtccatcctgtctaccatgcagccctccaccctggaaaccttccccgacctgttctgcctgcctctgggcgagtccttctccgctctgaccgtgtccgagcacgtgtcctacgtggtcaccaaccagtacctgatcaagggcatctcctaccccgtgtccaccaccgtcgtgggccagtccctgatcatcacccagaccgactcccagaccaagtgcgagctgacccgtaacatgcacaccactcactccatcaccgctgctctgaacatctccctcgagaactgcgctttctgccagtccgctctgttggagtacgacgacactcagggtgtcatcaacatcatgtacatgcacgactccgacgacgtgctgttcgctctggacccctacaacgaggtggtggtgtcctccccccgtacccactacctgatgctgctgaagaacggcaccgtgctggaagtgaccgacgtggtggtggacgctaccgaccgtctgctgatgatgtccgtgtacgctctgtccgctatcatcggcatctacctgctgtaccgtatgctgaagacctgccagctgttgaattttgaccttcttaagcttgcgggagacgtcgagtccaaccctgggcccatgggtgctcgtgcttcagtgctgtccggtggcgagctggacaagtgggagaagatccgtctgcgtcccggtggcaagaagcagtacaagctgaagcacatcgtgtgggcttcccgcgagctggaacgtttcgctgtgaaccccggcctgctggaaacctccgagggttgccgtcagatcctgggccagctgcagccctccctgcagaccggttccgaggaactgcgttccctgtacaacactatcgctgtgctgtactgcgtgcaccagcgtatcgacgtgaaggacaccaaggaagctctggacaagatcgaggaagaacagaacaagtccaagaagaaggcccagcaggctgctgctgacaccggcaacaactcccaggtgtcccagaactaccccatcgtgcagaacctgcagggccagatggtgcaccaggctatctccccccgtaccctgaacgcttgggtcaaggtggtggaagagaaggctttcagccccgaagtgatccccatgttctccgctctgtccgagggtgctaccccccaggacctgaacaccatgctgaacaccgtgggtggtcaccaggctgctatgcagatgctgaaggaaaccatcaacgaagaggctgctgagtgggaccgtctgcaccccgtgcacgctggtcctatcgctcccggacagatgcgcgagccccgtggttccgacatcgctggaaccacctccaccctgcaagagcagatcggctggatgacccacaacccccccatccccgtgggcgagatctacaagcgttggatcatcctgggcctgaacaagatcgtgcgtatgtactcccccacctccatcctggacatccgtcagggtcccaaggaacccttccgtgactacgtggaccgtttctacaagaccctgcgtgccgagcaggcttcccaagaggtcaagaactggatgaccgagactctgctggtgcagaacgctaaccccgactgcaagaccatcctgaaggctctgggtcccggtgctaccctggaagagatgatgaccgcttgccagggtgtcggtggtcccggtcacaaggctcgtgtgctggctgaggctatgtcccaagtgaccaaccccgctaccatcatgatccagaagggcaacttccgtaaccagcgcaagaccgtgaagtgcttcaactgcggcaaggaaggccacatcgctaagaactgccgtgctccccgcaagaagggctgctggaagtgcggaaaggaaggacaccagatgaaggactgcaccgagcgtcaggctaacttcctgggcaagatctggccctcccacaagggtcgtcccggcaacttcctgcagtcccgtcccgagcccaccgctcccccagaggaatccttccgtttcggcgaggaaaccaccaccccatcccagaagcaagagcccatcgacaaggaactgtaccccctggcttccctgcgctccctgttcggttccgacccatcctcccagtaaggcgcccaagcttgtcgagaagtactagaggatcataatcagccataccacatttgtagaggttttacttgctttaaaaaacctcccacacctccccctgaacctgaaacataaaatgaatgcaattgttgttgttaacttgtttattgcagcttataatggttacaaataaagcaatagcatcacaaatttcacaaataaagcatttttttcactgcattctagttgtggtttgtccaaactcatcaatgtatcttatcatgtctggatctgatcactgcttgagcctagaagatccggctgctaacaaagcccgaaaggaagctgagttggctgctgccaccgctgagcaataactatcataacccctaggagatccgaaccagataagtgaaatctagttccaaactattttgtcatttttaattttcgtattagcttacgacgctacacccagttcccatctattttgtcactcttccctaaataatccttaaaaactccatttccacccctcccagttcccaactattttgtccgcccaca

SEQ ID NO: 30 - DNA, 14239 bp, Artificial Sequence
  Synthetic construct
tgtgggcggacaaaatagttgggaactgggaggggtggaaatggagtttttaaggattatttagggaagagtgacaaaatagatgggaactgggtgtagcgtcgtaagctaatacgaaaattaaaaatgacaaaatagtttggaactagatttcacttatctggttcggatctcctaggggttatgatagttattgctcagcggtggcagcagccaactcagcttcctttcgggctttgttagcagccggatcttctaggctcaagcagtgatcagatccagacatgataagatacattgatgagtttggacaaaccacaactagaatgcagtgaaaaaaatgctttatttgtgaaatttgtgatgctattgctttatttgtaaccattataagctgcaataaacaagttaacaacaacaattgcattcattttatgtttcaggttcagggggaggtgtgggaggttttttaaagcaagtaaaacctctacaaatgtggtatggctgattatgatcctctagtacttctcgacaagcttgggcgccttactgggaggatgggtcggaaccgaacagggagcgcagggaagccagggggtacagttccttgtcgatgggctcttgcttctgggatggggtggtggtttcctcgccgaaacggaaggattcctctgggggagcggtgggctcgggacgggactgcaggaagttgccgggacgacccttgtgggagggccagatcttgcccaggaagttagcctgacgctcggtgcagtccttcatctggtgtccttcctttccgcacttccagcagcccttcttgcggggagcacggcagttcttagcgatgtggccttccttgccgcagttgaagcacttcacggtcttgcgctggttacggaagttgcccttctggatcatgatggtagcggggttggtcacttgggacatagcctcagccagcacacgagccttgtgaccgggaccaccgacaccctggcaagcggtcatcatctcttccagggtagcaccgggacccagagccttcaggatggtcttgcagtcggggttagcgttctgcaccagcagagtctcggtcatccagttcttgacctcttgggaagcctgctcggcacgcagggtcttgtagaaacggtccacgtagtcacggaagggttccttgggaccctgacggatgtccaggatggaggtgggggagtacatacgcacgatcttgttcaggcccaggatgatccaacgcttgtagatctcgcccacggggatgggggggttgtgggtcatccagccgatctgctcttgcagggtggaggtggttccagcgatgtcggaaccacggggctcgcgcatctgtccgggagcgataggaccagcgtgcacggggtgcagacggtcccactcagcagcctcttcgttgatggtttccttcagcatctgcatagcagcctggtgaccacccacggtgttcagcatggtgttcaggtcctggggggtagcaccctcggacagagcggagaacatggggatcacttcggggctgaaagccttctcttccaccaccttgacccaagcgttcagggtacggggggagatagcctggtgcaccatctggccctgcaggttctgcacgatggggtagttctgggacacctgggagttgttgccggtgtcagcagcagcctgctgggccttcttcttggacttgttctgttcttcctcgatcttgtccagagcttccttggtgtccttcacgtcgatacgctggtgcacgcagtacagcacagcgatagtgttgtacagggaacgcagttcctcggaaccggtctgcagggagggctgcagctggcccaggatctgacggcaaccctcggaggtttccagcaggccggggttcacagcgaaacgttccagctcgcgggaagcccacacgatgtgcttcagcttgtactgcttcttgccaccgggacgcagacggatcttctcccacttgtccagctcgccaccggacagcactgaagcacgagcacccatgggcccagggttggactcgacgtctcccgcaagcttaagaaggtcaaaattcaacagctggcaggtcttcagcatacggtacagcaggtagatgccgatgatagcggacagagcgtacacggacatcatcagcagacggtcggtagcgtccaccaccacgtcggtcacttccagcacggtgccgttcttcagcagcatcaggtagtgggtacggggggaggacaccaccacctcgttgtaggggtccagagcgaacagcacgtcgtcggagtcgtgcatgtacatgatgttgatgacaccctgagtgtcgtcgtactccaacagagcggactggcagaaagcgcagttctcgagggagatgttcagagcagcggtgatggagtgagtggtgtgcatgttacgggtcagctcgcacttggtctgggagtcggtctgggtgatgatcagggactggcccacgacggtggtggacacggggtaggagatgcccttgatcaggtactggttggtgaccacgtaggacacgtgctcggacacggtcagagcggagaaggactcgcccagaggcaggcagaacaggtcggggaaggtttccagggtggagggctgcatggtagacaggatggacagagcagcaggcacggtggtaggcacggtagcgtcggggaacagacgggtcagacgttccagggagtggtcacgacgaccggaagaggagcagggggtgtacaggtcggacaggtactcgtggtgggggtgagccagcagctgggtgaagtgggacagctcggccagggagcacaggccggtttccacgatgaagatctcgcgacgctcggtggtgtgcaccagcatggagtgcaccagggaacccatcaggtacagctcttggcgagcgaaagcgctgaggaatgaagccaggtgggtcttgtgcagcttcagagcgaagtcagcgatctgacgcagagcccactgggggatcaggtgctgctggttctgcttggacaggatgtacaccagacgcacgagggaggtgatgtcggtgatctggttgggggtccacagagcacgcttagccaggtccacagcggtggggtacagcagcagggtggtacgagggggggtctgggacaggcaagtgatcatgaactcttggatctgcagcagagcagcctgacggtccagagcacggggcacggacacctgagcgccagcctcttcttgacgagcagcagcgaacagagccagggcgtaagcgaaagccatctcgacggtacgacggtccagcatctggcaacgaccggacttcagcacgtccacagcgtaacggtggaaggagttcctcagcagagcggacaggtccaggtagttgaagtccagagcagcgtccaggaagtcggggtccttcaggtaagagtgacggttcagctggtccttcttgaccagcaccagcagctcgtgcttctcggtctgacgcaggatgaagttgtcacgctggtagggagccttgaacagcacacgggggaggtgaccgaagatcagcagcatgggggtgtcgtcgtcgatggacacggtgaccacgaagaaatcctcggtcagggtgatcttcacgtaacgcagctcgtcgatgaggtagaagccctggtgcaggcagggggtcacggtggagaacagcaggtcgtgaccgtcgaacaggatgcaggtctggttgaagtggggacggtgcagtccggaggtggtgtgggactcggtccagccgtgaggagtggtctgggggggcatccacacgtgggggatggacaggtcgatagggggaggcacagtggtgggctgctcgcccagggagtcctgagccttcagctgctggctgaaggaacggtaggaagccaggtccttggacaccagagcgtaagtgttcagacgctgctggtaacgctcgagagtctcggtcaggtccacctggttcaggaactgctcagccaggggaccagcgaacaggcaacggggcatgtggaacacgtagtactggttgtaggactggaagaagttgaaggagatagcgttctcgcggacgacggtggagttgcgcagggaggagttgtaggtgcactgggtggtgttctcgcgcaggaaacggataggacgaccgtaggtgttcagcaggaggtggaaagccttgtccaggggctcggagatagcctcagcaccgtaacgggaggacaggaggtgggacagcaggcacacagccagcacgatcaggtaggagggcaggccgggacgcatggtggcggatccgcgcccgatggtgggacggtatgaataatccggaatatttataggtttttttattacaaaactgttacgaaaacagtaaaatacttatttatttgcgagatggttatcattttaattatctccatgatctattaatattcccagcttcctttcgggctttgttagcagccggatcttctaggctcaagcagtgatcagatccagacatgataagatacattgatgagtttggacaaaccacaactagaatgcagtgaaaaaaatgctttatttgtgaaatttgtgatgctattgctttatttgtaaccattataagctgcaataaacaagttaacaacaacaattgcattcattttatgtttcaggttcagggggaggtgtgggaggttttttaaagcaagtaaaacctctacaaatgtggtatggctgattatgatctctagtacttctcgacaagcttggcgcgccttagacgttctcttcctcgtcggagtccttcaggtgacggtaaccgttcttgcggtgacgcagacggtccagcaggttgggcttctggcccttgtcctgggttccggtctggccgtccagggagtcggtgccgttctgctgtgcacgctgctcagcgtccagacgcacgagagccagcagcatctggtaagcctgctcgttggtgtatgggggagcagcggtagaagcgtcggaggaagggggaccgggacccttgcgaccggagttgtagacggattcctcgtaggatgggggagcctgcagggaggtgtccttggtgttgccggaggtcacggtagtaccgtcagcggacaccaggtaggggaacaggttctgcaggggctgcatgcacagacgacgctgacgggtgtagatcaggtagatgatgatgaccacagcgatagccaccaggatgatggtgaaagcaccgaaggggttcttcaggaaggtggcgacaccctcgaccacggaagccacagcaccacccacagcaccgatagcgacacccacagccttgccggcagctcccaggccggacatcaggtcgtccagtcccttcaggtaggggggcagggggtccaccaccttgtcctcgacgtacttaacacgctgcttgtaggagttgaactcgcgcatgatctcttccaggtcgaacacgttgatggaacgcagttccttctgggagtacagttccagcacacggaagtcggtgttttccagggggtcgatgtccagagcgatcatggagtccacggtagagatggaggacaggtcgatcatgcgcttgaacaggtagtccacgtattcgtaagcggagttgccagcgatgaagatcttcagggagggcagctggcattcctcggtacggtggttgcccagcaggatctcgttgtcctcgcccagctggccgtactgcacgtaggaggagttagcgaagttgaagatgaccacgggacgggagtagcaacgaccgggggattccttcacgttcatgtcacgcagcaccttcacggaagtctggttgatggtcacgcaggaagccaggcccagcacgtcgcccatgaaacgagcagcgataggcttgttgtagatggcggacaggatagcggaggggttgatcttggacagttccttgaacacttccagggtacgacgctggtccacgcaccaagcctcagcgatctgagccagagcacggttgatgtaaccgcgcagggtgtcgtaggtgaactgcagctgagcgtacaccaggttgtgcacggattccatgttggacaggtgagtagcgttgttgccgtcggtggaacgcttggtacggttgtgggtcaggttcagggaggaacggttagccagacgttccagctcgaccagggacttctgcttgataccctgccagaacaccaccaggccaccggtagtctcgaacacggacacgtttccgtacttctcgtaggtctggttgtaggaggtgttgaagatctgctgcagcttgttgatagcctcgtcacgcacgcagtccagggcggagtcggacatgttgacctcttgtttcttggacaggaaggtagcggtcatcttagcgctggagaagtggtaggagtcctcagcctcggaacggatggtacgctcggaagcctcccagaaggtcagctggcaggtcacgttcttctcgtcctggatgtcccaggagatcacggagtcagcacgctccaagaaagccaccagacggtgggtttccagagcggagttgggacgaccgaagtcggacacgatggtgtagttggggaagatgaagaacttgtcagcgttctcgccgaagtaggaagcgttacggttagtaccgttgtagaagggggagatgtccaccacgtcgccggtggaggtagcgaagaagtggtaagggtacttggaacgagcggtggtgatggtgaccatgcagttcaggttgcaggtttcacggtacagccaggtggaaccacgggagtgccactggtccttcacggtcacgtaacgggtggagtgggtgttggagtagtcgtcgggcatcagctgcatggtcttgttctcgtaggagtcacggtggtaagccacgaacacggtgccagcgatcacacgggagtaagaggagtagcactgggagtgggagttgatgtggtggatctcccacatgggaggggccacgtactcggtgttggaacccagcaggtaagtggtgtggatgtaagcgtaggaacgacggaaggtcagcaccttctggtacacgcggaccttgaaggtgtgagccacgatgttgcgcttgtacaccaccatgataccctcgtccaggtcctcgttgatgggcttcatggaggtgcacacgatgttacgctcgaaacggatcaggtcggtgccctgagccatggagcacacacggtaggggtacttggtggtgttgacacccacgacgtcgccgtacttcagggtggtgttgtagatagtctcgttgacaccgtgggacacggtctgggaggaggtcacacgctgggacacggaaccggaacgggagtgagcggcggaggtggtgtgggaggagtggtgggagtgggtagcggaggtgccacgggtggaggaggaggacacagcagcacccaggcacacgatgcacaggttcacgcacacgaccaggcaccagatacgggattccatggtggcgtcgacggtaggcctttgaattccgcgcgcttcggaccgggatccgcgcccgatggtgggacggtatgaataatccggaatatttataggtttttttattacaaaactgttacgaaaacagtaaaatacttatttatttgcgagatggttatcattttaattatctccatgatctattaatattccgggggttatgatagttattgctcagcggtggcagcagccaactcagcttcctttcgggctttgttagcagccggatcttctaggctcaagcagtgatcagatccagacatgataagatacattgatgagtttggacaaaccacaactagaatgcagtgaaaaaaatgctttatttgtgaaatttgtgatgctattgctttatttgtaaccattataagctgcaataaacaagttaacaacaacaattgcattcattttatgtttcaggttcagggggaggtgtgggaggttttttaaagcaagtaaaacctctacaaatgtggtatggctgattatgatcctctagtacttctcgacaagcttttattagttggcgaacagacgcacggagaactccaaggaacgagcgtggggagccagggaaccagcagcgttgaaggtggtacgcttgttggtgccaccacgacggttctgacgacggaagtcggagatcagcagggacacctcggtcacgttgatacgcttcagcacgtcgaagttgtccaggccgtgggaagcgtcgtagtggtagttcagggtcaggtccaccagctgctcgacgtacttgtaacgggtctggtcgggcagagcacgggagcaagcgtcccagtagtggggcacacggtagtagtcgttcttctcagcggtttcacgctggcactgtcccagcaccacagcgcacaggcacacggacagccacacacggcacagacgcatggtggcggatccggtggcggatccgcgcccgatggtgggacggtatgaataatccggaatatttataggtttttttattacaaaactgttacgaaaacagtaaaatacttatttatttgcgagatggttatcattttaattatctccatgatctattaatattccgggcaattaatgtgagttagctcactcattaggcacccagcagccaactcagcttcctttcgggctttgttagcagccggatcttctaggctcaagcagtgatcagatccagacatgataagatacattgatgagtttggacaaaccacaactagaatgcagtgaaaaaaatgctttatttgtgaaatttgtgatgctattgctttatttgtaaccattataagctgcaataaacaagttaacaacaacaattgcattcattttatgtttcaggttcagggggaggtgtgggaggttttttaaagcaagtaaaacctctacaaatgtggtatggctgattatgatcctctagtacttctcgacaagcttgtcgacttacacgatcaggttggggtgggtgcagaaggtgtaggtctggttgttagcctcggtgaaggtcaggcgcacttggaaggacacggagtagtcacggaacacgtgagcccaggattccagcttcatcacgcacatctggtaacgggtgccgtcgttgaccacgaaacgcagcagcttggtctgcttgggcaccatgtgagcaccgaagatcttagcgtcctcgacggagatctgcacgttgccgtcggagggcttggaagcggtacggggcatacgctgcaggatggtctggttacgaccggacaagtaccagatgaccttcttgacccaggtggaggacctctcgaccagggtctggccctcgcggttgtacagcaggtacagagtctcgttacggcactcgggaccggtggacacacgctggaaaccggagaactgggatggggaacgaggtggggatgggtacaggaaggggcagtagaaggtagcagcgtcgtggggcttggggtaggtcagcttggaccagggtggggaggggttctggttagcggtcagggtgaaccagggggaagccaggcagggggtagcccacacagcgcacagcagcaggcagtggaagtggtgacgcagcagcagacgcagcatggtggcggatccgcgcccgatggtgggacggtatgaataatccggaatatttataggtttttttattacaaaactgttacgaaaacagtaaaatacttatttatttgcgagatggttatcattttaattatctccatgatctattaatattccggtctagatgtatctccttcttaaagttaaacaaagctagccacagcagccaactcagcttcctttcgggctttgttagcagccggatcttctaggctcaagcagtgatcagatccagacatgataagatacattgatgagtttggacaaaccacaactagaatgcagtgaaaaaaatgctttatttgtgaaatttgtgatgctattgctttatttgtaaccattataagctgcaataaacaagttaacaacaacaattgcattcattttatgtttcaggttcagggggaggtgtgggaggttttttaaagcaagtaaaacctctacaaatgtggtatggctgattatgatcctctagtacttctcgacaagcttttactgcagcatgtaacccatcttagcacggcacacgtccagacgcttgtgcttcttcacggactcgaggtactggtccaggcccacgatacgggtgatcttgtcgtactcgaggttgatccaacggtagggcacggaaccagcagcacccagcaggtactgagccttgtcggacaccttgccgcaacggatacgaccgtcagcctcgaggtacagggggttgtagttgcagctggtcagcttgttgtggatcacttgacgggtcagggagtgggtcatggtggtcacgataccacggatctcagcggtcttttcgggggagtagcacacttcgccgtcggggcaacgcagagccacggtgaacaggttgcacatcttgaagtcgtagcagcgctcgggggggtggttcacgttgatcacttcgcagcattcctcagcacgcacacgaggcacacgggagtggtccagcagcagccacagggtggtcaggaagggggtcaggtccttggagttcatggtggcggatccgcgcccgatggtgggacggtatgaataatccggaatatttataggtttttttattacaaaactgttacgaaaacagtaaaatacttatttatttgcgagatggttatcattttaattatctccatgatctattaatattccggagtaggtcgcgaatcgatactagtatacggacctttaattcaacccaacacaatatattatagttaaataagaattattatcaaatcatttgtatattaattaaaatactatactgtaaattacattttatttacaatcactcgacgaagacttgatcacccgggatctcgagccaccatgtgccgtcgtcccgactgcggtttctccttctcccccggtcccgtggctctgctgtggtgctgcctgctgctgcccatcgtgtcctccgctaccgtgtccgtggctcccaccgtggctgagaaggtgcccgctgagtgccccgagctgacccgtcgttgcctgctgggagaggtgttccagggcgacaagtacgagtcctggctgcgtcccctggtcaacgtgacccgtagggacggtcccctgtcccagctgatccgttaccgtcccgtgacccccgaggctgctaactccgtgctgctggacgacgctttcctggacaccctggccctgctgtacaacaaccccgaccagctgcgtgctctgctgaccctgctgtcctccgacaccgctccccgttggatgaccgtgatgcgcggttactccgagtgcggcgacggttcccccgctgtgtacacttgcgtggacgacctgtgccgtggttacgacctgactcgtctgtcctacggtcgttccatcttcaccgaacacgtgctgggtttcgagctggtgcccccctccctgttcaacgtggtggtggctatccgtaacgaggctacccgtaccaaccgtgctgtgcgtctgcccgtgtccaccgctgctgctcccgagggtatcaccctgttctacggcctgtacaacgctgtgaaggaattctgcctgcgtcaccagctggacccccccctgctgcgtcacctggacaagtactacgctggcctgccccctgagctgaagcagacccgtgtgaacctgcccgctcactcccgttacggtccccaggctgtggacgctcgctaagctagcagctgatgcatagcatgcggtaccgggagatgggggaggctaactgaaacacggaaggagacaataccggaaggaacccgcgctatgacggcaataaaaagacagaataaaacgcacgggtgttgggtcgtttgttcataaacgcggggttcggtcccagggctggcactctgtcgataccccaccgagaccccattgggaccaatacgcccgcgtttcttccttttccccaccccaacccccaagttcgggtgaaggcccagggctcgcagccaacgtcggggcggcaagccctgccatagccactacgggtacgtttaaaccagataacttcgtataatgtatgctatacgaagttatggtaccgcggccgcgtagaggatctgttgatcagcagttcaacctgttgatagtacaaacaaagctgtagccaaccactagaactatagctagagtcctgggcgaacaaacgatgctcgccttccagaaaaccgaggatgcgaaccacttcatccggggtcagcaccaccggcaagcgccgcgacggccgaggtctaccgatctcctgaagcaagggcagatccgtgcacagcaccttgccgtagaagaacagcaaggccgccaatgcctgacgatgcgtggagaccgaaaccttgcgctcgttcgccagccaggacagaaatgcctcgacttcgctgctgcccaaggttgccgggtgacgcacaccgtggaaacggatgaaggcacaaacccagttgacataagcctgttcggttcgtaaactgtaatgcaagtagcgtatgcgctcacgcaactggtccagaaccttgaccgaacgcagcggtggtaacggcgcagtggcggttttcatggcttgttatgactgtttttttgtacagtctatgcctcgggcatccaagcagcaagcgcgttacgccgtgggtcgatgtttgatgttatggagcagcaacgatgttacgcagcagcaacgatgttacgcagcagggcagtcgccctaaaacaaagttaggtggctcaagtatgggcatcattcgcacatgtaggctcggccctgaccaagtcaaatccatgcgggctgctcttgatcttttcggtcgtgagttcggagacgtagccacctactcccaacatcagccggactccgattacctcgggaacttgctccgtagtaagacattcatcgcgcttgctgccttcgaccaagaagcggttgttggcgctctcgcggcttacgttctgcccaagtttgagcagccgcgtagtgagatctatatctatgatctcgcagtctccggcgagcaccggaggcagggcattgccaccgcgctcatcaatctcctcaagcatgaggccaacgcgcttggtgcttatgtgatctacgtgcaagcagattacggtgacgatcccgcagtggctctctatacaaagttgggcatacgggaagaagtgatgcactttgatatcgacccaagtaccgccacctaacaattcgttcaagccgagatcggcttcccggccgcggagttgttcggtaaattgtcacaacgccgcgaatatagtctttaccatgcccttggccacgcccctctttaatacgacgggcaatttgcacttcagaaaatgaagagtttgctttagccataacaaaagtccagtatgctttttcacagcataactggactgatttcagtttacaactattctgtctagtttaagactttattgtcatagtttagatctattttgttcagtttaagactttattgtccgcccacacccgcttacgcagggcatccatttattactcaaccgtaaccgattttgccaggttacgcggctggtctatgcactggccgtcgttttacaacgtcgtgactgggaaaaccctggcgttacccaacttaatcgccttgcagcacatccccctttcgccagctggcgtaatagcgaagaggcccgcaccgatcgcccttcccaacagttgcgcagcctgaatggcgaatggacgcgccctgtagcggcgcattaagcgcggcgggtgtggtggttacgcgcagcgtgaccgctacacttgccagcgccctagcgcccgctcctttcgctttcttcccttcctttctcgccacgttcgccggctttccccgtcaagctctaaatcgggggctccctttagggttccgatttagtgctttacggcacctcgaccccaaaaaacttgattagggtgatggttcacgtagtgggccatcgccctgatagacggtttttcgccctttgacgttggagtccacgttctttaatagtggactcttgttccaaactggaacaa

SEQ ID NO: 31 - DNA, 15957 bp, Artificial Sequence
  Synthetic construct
ttgttccagtttggaacaagagtccactattaaagaacgtggactccaacgtcaaagggcgaaaaaccgtctatcagggcgatggcccactacgtgaaccatcaccctaatcaagttttttggggtcgaggtgccgtaaagcactaaatcggaaccctaaagggagcccccgatttagagcttgacggggaaagccggcgaacgtggcgagaaaggaagggaagaaagcgaaaggagcgggcgctagggcgctggcaagtgtagcggtcacgctgcgcgtaaccaccacacccgccgcgcttaatgcgccgctacagggcgcgtccattcgccattcaggctgcgcaactgttgggaagggcgatcggtgcgggcctcttcgctattacgccagctggcgaaagggggatgtgctgcaaggcgattaagttgggtaacgccagggttttcccagtcacgacgttgtaaaacgacggccagtgcatagaccagccgcgtaacctggcaaaatcggttacggttgagtaataaatggatgccctgcgtaagcgggtgtgggcggacaataaagtcttaaactgaacaaaatagatctaaactatgacaataaagtcttaaactagacagaatagttgtaaactgaaatcagtccagttatgctgtgaaaaagcatactggacttttgttatggctaaagcaaactcttcattttctgaagtgcaaattgcccgtcgtattaaagaggggcgtggccaagggcatggtaaagactatattcgcggcgttgtgacaatttaccgaacaactccgcggccgggaagccgatctcggcttgaacgaattgttaggtggcggtacttgggtcgatatcaaagtgcatcacttcttcccgtatgcccaactttgtatagagagccactgcgggatcgtcaccgtaatctgcttgcacgtagatcacataagcaccaagcgcgttggcctcatgcttgaggagattgatgagcgcggtggcaatgccctgcctccggtgctcgccggagactgcgagatcatagatatagatctcactacgcggctgctcaaacttgggcagaacgtaagccgcgagagcgccaacaaccgcttcttggtcgaaggcagcaagcgcgatgaatgtcttactacggagcaagttcccgaggtaatcggagtccggctgatgttgggagtaggtggctacgtctccgaactcacgaccgaaaagatcaagagcagcccgcatggatttgacttggtcagggccgagcctacatgtgcgaatgatgcccatacttgagccacctaactttgttttagggcgactgccctgctgcgtaacatcgttgctgctgcgtaacatcgttgctgctccataacatcaaacatcgacccacggcgtaacgcgcttgctgcttggatgcccgaggcatagactgtacaaaaaaacagtcataacaagccatgaaaaccgccactgcgccgttaccaccgctgcgttcggtcaaggttctggaccagttgcgtgagcgcatacgctacttgcattacagtttacgaaccgaacaggcttatgtcaactgggtttgtgccttcatccgtttccacggtgtgcgtcacccggcaaccttgggcagcagcgaagtcgaggcatttctgtcctggctggcgaacgagcgcaaggtttcggtctccacgcatcgtcaggcattggcggccttgctgttcttctacggcaaggtgctgtgcacggatctgcccttgcttcaggagatcggtagacctcggccgtcgcggcgcttgccggtggtgctgaccccggatgaagtggttcgcatcctcggttttctggaaggcgagcatcgtttgttcgcccaggactctagctatagttctagtggttggctacagctttgtttgtactatcaacaggttgaactgctgatcaacagatcctctacgcggccgcggtaccataacttcgtatagcatacattatacgaagttatctggtttaaacgtacccgtagtggctatggcagggcttgccgccccgacgttggctgcgagccctgggccttcacccgaacttgggggttggggtggggaaaaggaagaaacgcgggcgtattggtcccaatggggtctcggtggggtatcgacagagtgccagccctgggaccgaaccccgcgtttatgaacaaacgacccaacacccgtgcgttttattctgtctttttattgccgtcatagcgcgggttccttccggtattgtctccttccgtgtttcagttagcctcccccatctcccggtaccgcatgctatgcatcagctgctagcttagcgagcgtccacagcctggggaccgtaacgggagtgagcgggcaggttcacacgggtctgcttcagctcagggggcaggccagcgtagtacttgtccaggtgacgcagcaggggggggtccagctggtgacgcaggcagaattccttcacagcgttgtacaggccgtagaacagggtgataccctcgggagcagcagcggtggacacgggcagacgcacagcacggttggtacgggtagcctcgttacggatagccaccaccacgttgaacagggaggggggcaccagctcgaaacccagcacgtgttcggtgaagatggaacgaccgtaggacagacgagtcaggtcgtaaccacggcacaggtcgtccacgcaagtgtacacagcgggggaaccgtcgccgcactcggagtaaccgcgcatcacggtcatccaacggggagcggtgtcggaggacagcagggtcagcagagcacgcagctggtcggggttgttgtacagcagggccagggtgtccaggaaagcgtcgtccagcagcacggagttagcagcctcgggggtcacgggacggtaacggatcagctgggacaggggaccgtccctacgggtcacgttgaccaggggacgcagccaggactcgtacttgtcgccctggaacacctctcccagcaggcaacgacgggtcagctcggggcactcagcgggcaccttctcagccacggtgggagccacggacacggtagcggaggacacgatgggcagcagcaggcagcaccacagcagagccacgggaccgggggagaaggagaaaccgcagtcgggacgacggcacatggtggctcgagatcccgggtgatcaagtcttcgtcgagtgattgtaaataaaatgtaatttacagtatagtattttaattaatatacaaatgatttgataataattcttatttaactataatatattgtgttgggttgaattaaaggtccgtatactagtatcgattcgcgacctactccggaatattaatagatcatggagataattaaaatgataaccatctcgcaaataaataagtattttactgttttcgtaacagttttgtaataaaaaaacctataaatattccggattattcataccgtcccaccatcgggcgcggatccgccaccatgtcccccaagaacctgacccccttcctgaccgctctgtggctgctgctgggccactcccgtgtgcctcgtgtgcgtgctgaggaatgctgcgagttcatcaacgtgaaccacccccccgagcgctgctacgacttcaagatgtgcaaccgtttcaccgtggctctgcgttgccccgacggcgaagtgtgctactcccccgaaaagaccgctgagatccgtggtatcgtgaccaccatgacccactccctgacccgtcaggtggtgcacaacaagctgacctcttgcaactacaaccccctgtacctcgaggctgacggtcgtatccgttgcggcaaggtcaacgacaaggctcagtacctgctgggtgctgctggttccgtgccctaccgttggatcaacctcgagtacgacaagatcacccgtatcgtgggcctggaccagtacctcgagtccgtgaagaagcacaagcgtctggacgtgtgccgtgctaagatgggttacatgctgcagtaaaagcttgtcgagaagtactagaggatcataatcagccataccacatttgtagaggttttacttgctttaaaaaacctcccacacctccccctgaacctgaaacataaaatgaatgcaattgttgttgttaacttgtttattgcagcttataatggttacaaataaagcaatagcatcacaaatttcacaaataaagcatttttttcactgcattctagttgtggtttgtccaaactcatcaatgtatcttatcatgtctggatctgatcactgcttgagcctagaagatccggctgctaacaaagcccgaaaggaagctgagttggctgctgtggctagctttgtttaactttaagaaggagatacatctagaccggaatattaatagatcatggagataattaaaatgataaccatctcgcaaataaataagtattttactgttttcgtaacagttttgtaataaaaaaacctataaatattccggattattcataccgtcccaccatcgggcgcggatccgccaccatgctgcgtctgctgctgcgtcaccacttccactgcctgctgctgtgcgctgtgtgggctaccccctgcctggcttccccttggtccaccctgaccgctaaccagaacccctccccaccctggtccaagctgacctactccaagccccacgacgctgctaccttctactgccccttcctgtacccatccccccctcgttccccactgcagttctccggtttccagcgtgtgctgaccggtcccgagtgccgtaacgagactctgtacctgctgtacaaccgcgagggccagaccctggtcgagaggtcctccacctgggtcaagaaggtcatctggtacttgtccggtcgtaaccagaccatcctgcagcgtatgccccgtaccgcttccaagccctccgacggcaacgtgcagatctccgtcgaggacgctaagatcttcggtgctcacatggtgcccaagcagaccaagctgctgcgtttcgtggtcaacgacggcacccgttaccagatgtgcgtgatgaagctcgagtcctgggctcacgtgttccgtgactactccgtgtccttccaagtgcgcctgaccttcaccgaggctaacaaccagacctacaccttctgcacccaccccaacctgatcgtgtaaaagcttgtcgagaagtactagaggatcataatcagccataccacatttgtagaggttttacttgctttaaaaaacctcccacacctccccctgaacctgaaacataaaatgaatgcaattgttgttgttaacttgtttattgcagcttataatggttacaaataaagcaatagcatcacaaatttcacaaataaagcatttttttcactgcattctagttgtggtttgtccaaactcatcaatgtatcttatcatgtctggatctgatcactgcttgagcctagaagatccggctgctaacaaagcccgaaaggaagctgagttggctgctgggtgcctaatgagtgagctaactcacattaattgcccggaatattaatagatcatggagataattaaaatgataaccatctcgcaaataaataagtattttactgttttcgtaacagttttgtaataaaaaaacctataaatattccggattattcataccgtcccaccatcgggcgcggatccgccaccatgcgtctgtgccgtgtgtggctgtccgtgtgcctgtgcgctgtggtgctgggccagtgccagcgtgaaaccgctgagaagaacgactactaccgtgtgccccactactgggacgcttgctcccgtgctctgcccgaccagacccgttacaagtacgtcgagcagctggtggacctgaccctgaactaccactacgacgcttcccacggcctggacaacttcgacgtgctgaagcgtatcaacgtgaccgaggtgtccctgctgatctccgacttccgtcgtcagaaccgtcgtggtggcaccaacaagcgtaccaccttcaacgctgctggttccctggctccccacgctcgttccctcgagttctccgtgcgtctgttcgctaactaaaagcttgtcgagaagtactagaggatcataatcagccataccacatttgtagaggttttacttgctttaaaaaacctcccacacctccccctgaacctgaaacataaaatgaatgcaattgttgttgttaacttgtttattgcagcttataatggttacaaataaagcaatagcatcacaaatttcacaaataaagcatttttttcactgcattctagttgtggtttgtccaaactcatcaatgtatcttatcatgtctggatctgatcactgcttgagcctagaagatccggctgctaacaaagcccgaaaggaagctgagttggctgctgccaccgctgagcaataactatcataacccccggaatattaatagatcatggagataattaaaatgataaccatctcgcaaataaataagtattttactgttttcgtaacagttttgtaataaaaaaacctataaatattccggattattcataccgtcccaccatcgggcgcggatcccggtccgaagcgcgcggaattcaaaggcctaccgtcgacgccaccatggaatcccgtatctggtgcctggtcgtgtgcgtgaacctgtgcatcgtgtgcctgggtgctgctgtgtcctcctcctccacccgtggcacctccgctacccactcccaccactcctcccacaccacctccgccgctcactcccgttccggttccgtgtcccagcgtgtgacctcctcccagaccgtgtcccacggtgtcaacgagactatctacaacaccaccctgaagtacggcgacgtcgtgggtgtcaacaccaccaagtacccctaccgtgtgtgctccatggctcagggcaccgacctgatccgtttcgagcgtaacatcgtgtgcacctccatgaagcccatcaacgaggacctggacgagggtatcatggtggtgtacaagcgcaacatcgtggctcacaccttcaaggtccgcgtgtaccagaaggtgctgaccttccgtcgttcctacgcttacatccacaccacttacctgctgggttccaacaccgagtacgtggcccctcccatgtgggagatccaccacatcaactcccactcccagtgctactcctcttactcccgtgtgatcgctggcaccgtgttcgtggcttaccaccgtgactcctacgagaacaagaccatgcagctgatgcccgacgactactccaacacccactccacccgttacgtgaccgtgaaggaccagtggcactcccgtggttccacctggctgtaccgtgaaacctgcaacctgaactgcatggtcaccatcaccaccgctcgttccaagtacccttaccacttcttcgctacctccaccggcgacgtggtggacatctcccccttctacaacggtactaaccgtaacgcttcctacttcggcgagaacgctgacaagttcttcatcttccccaactacaccatcgtgtccgacttcggtcgtcccaactccgctctggaaacccaccgtctggtggctttcttggagcgtgctgactccgtgatctcctgggacatccaggacgagaagaacgtgacctgccagctgaccttctgggaggcttccgagcgtaccatccgttccgaggctgaggactcctaccacttctccagcgctaagatgaccgctaccttcctgtccaagaaacaagaggtcaacatgtccgactccgccctggactgcgtgcgtgacgaggctatcaacaagctgcagcagatcttcaacacctcctacaaccagacctacgagaagtacggaaacgtgtccgtgttcgagactaccggtggcctggtggtgttctggcagggtatcaagcagaagtccctggtcgagctggaacgtctggctaaccgttcctccctgaacctgacccacaaccgtaccaagcgttccaccgacggcaacaacgctactcacctgtccaacatggaatccgtgcacaacctggtgtacgctcagctgcagttcacctacgacaccctgcgcggttacatcaaccgtgctctggctcagatcgctgaggcttggtgcgtggaccagcgtcgtaccctggaagtgttcaaggaactgtccaagatcaacccctccgctatcctgtccgccatctacaacaagcctatcgctgctcgtttcatgggcgacgtgctgggcctggcttcctgcgtgaccatcaaccagacttccgtgaaggtgctgcgtgacatgaacgtgaaggaatcccccggtcgttgctactcccgtcccgtggtcatcttcaacttcgctaactcctcctacgtgcagtacggccagctgggcgaggacaacgagatcctgctgggcaaccaccgtaccgaggaatgccagctgccctccctgaagatcttcatcgctggcaactccgcttacgaatacgtggactacctgttcaagcgcatgatcgacctgtcctccatctctaccgtggactccatgatcgctctggacatcgaccccctggaaaacaccgacttccgtgtgctggaactgtactcccagaaggaactgcgttccatcaacgtgttcgacctggaagagatcatgcgcgagttcaactcctacaagcagcgtgttaagtacgtcgaggacaaggtggtggaccccctgcccccctacctgaagggactggacgacctgatgtccggcctgggagctgccggcaaggctgtgggtgtcgctatcggtgctgtgggtggtgctgtggcttccgtggtcgagggtgtcgccaccttcctgaagaaccccttcggtgctttcaccatcatcctggtggctatcgctgtggtcatcatcatctacctgatctacacccgtcagcgtcgtctgtgcatgcagcccctgcagaacctgttcccctacctggtgtccgctgacggtactaccgtgacctccggcaacaccaaggacacctccctgcaggctcccccatcctacgaggaatccgtctacaactccggtcgcaagggtcccggtcccccttcctccgacgcttctaccgctgctcccccatacaccaacgagcaggcttaccagatgctgctggctctcgtgcgtctggacgctgagcagcgtgcacagcagaacggcaccgactccctggacggccagaccggaacccaggacaagggccagaagcccaacctgctggaccgtctgcgtcaccgcaagaacggttaccgtcacctgaaggactccgacgaggaagagaacgtctaaggcgcgccaagcttgtcgagaagtactagagatcataatcagccataccacatttgtagaggttttacttgctttaaaaaacctcccacacctccccctgaacctgaaacataaaatgaatgcaattgttgttgttaacttgtttattgcagcttataatggttacaaataaagcaatagcatcacaaatttcacaaataaagcatttttttcactgcattctagttgtggtttgtccaaactcatcaatgtatcttatcatgtctggatctgatcactgcttgagcctagaagatccggctgctaacaaagcccgaaaggaagctgggaatattaatagatcatggagataattaaaatgataaccatctcgcaaataaataagtattttactgttttcgtaacagttttgtaataaaaaaacctataaatattccggattattcataccgtcccaccatcgggcgcggatccgccaccatgcgtcccggcctgccctcctacctgatcgtgctggctgtgtgcctgctgtcccacctcctgtcctcccgttacggtgctgaggctatctccgagcccctggacaaggctttccacctcctgctgaacacctacggtcgtcctatccgtttcctgcgcgagaacaccacccagtgcacctacaactcctccctgcgcaactccaccgtcgtccgcgagaacgctatctccttcaacttcttccagtcctacaaccagtactacgtgttccacatgccccgttgcctgttcgctggtcccctggctgagcagttcctgaaccaggtggacctgaccgagactctcgagcgttaccagcagcgtctgaacacttacgctctggtgtccaaggacctggcttcctaccgttccttcagccagcagctgaaggctcaggactccctgggcgagcagcccaccactgtgcctccccctatcgacctgtccatcccccacgtgtggatgcccccccagaccactcctcacggctggaccgagtcccacaccacctccggactgcaccgtccccacttcaaccagacctgcatcctgttcgacggtcacgacctgctgttctccaccgtgaccccctgcctgcaccagggcttctacctcatcgacgagctgcgttacgtgaagatcaccctgaccgaggatttcttcgtggtcaccgtgtccatcgacgacgacacccccatgctgctgatcttcggtcacctcccccgtgtgctgttcaaggctccctaccagcgtgacaacttcatcctgcgtcagaccgagaagcacgagctgctggtgctggtcaagaaggaccagctgaaccgtcactcttacctgaaggaccccgacttcctggacgctgctctggacttcaactacctggacctgtccgctctgctgaggaactccttccaccgttacgctgtggacgtgctgaagtccggtcgttgccagatgctggaccgtcgtaccgtcgagatggctttcgcttacgccctggctctgttcgctgctgctcgtcaagaagaggctggcgctcaggtgtccgtgccccgtgctctggaccgtcaggctgctctgctgcagatccaagagttcatgatcacttgcctgtcccagaccccccctcgtaccaccctgctgctgtaccccaccgctgtggacctggctaagcgtgctctgtggacccccaaccagatcaccgacatcacctccctcgtgcgtctggtgtacatcctgtccaagcagaaccagcagcacctgatcccccagtgggctctgcgtcagatcgctgacttcgctctgaagctgcacaagacccacctggcttcattcctcagcgctttcgctcgccaagagctgtacctgatgggttccctggtgcactccatgctggtgcacaccaccgagcgtcgcgagatcttcatcgtggaaaccggcctgtgctccctggccgagctgtcccacttcacccagctgctggctcacccccaccacgagtacctgtccgacctgtacaccccctgctcctcttccggtcgtcgtgaccactccctggaacgtctgacccgtctgttccccgacgctaccgtgcctaccaccgtgcctgctgctctgtccatcctgtctaccatgcagccctccaccctggaaaccttccccgacctgttctgcctgcctctgggcgagtccttctccgctctgaccgtgtccgagcacgtgtcctacgtggtcaccaaccagtacctgatcaagggcatctcctaccccgtgtccaccaccgtcgtgggccagtccctgatcatcacccagaccgactcccagaccaagtgcgagctgacccgtaacatgcacaccactcactccatcaccgctgctctgaacatctccctcgagaactgcgctttctgccagtccgctctgttggagtacgacgacactcagggtgtcatcaacatcatgtacatgcacgactccgacgacgtgctgttcgctctggacccctacaacgaggtggtggtgtcctccccccgtacccactacctgatgctgctgaagaacggcaccgtgctggaagtgaccgacgtggtggtggacgctaccgaccgtctgctgatgatgtccgtgtacgctctgtccgctatcatcggcatctacctgctgtaccgtatgctgaagacctgccagctgttgaattttgaccttcttaagcttgcgggagacgtcgagtccaaccctgggcccatgggtgctcgtgcttcagtgctgtccggtggcgagctggacaagtgggagaagatccgtctgcgtcccggtggcaagaagcagtacaagctgaagcacatcgtgtgggcttcccgcgagctggaacgtttcgctgtgaaccccggcctgctggaaacctccgagggttgccgtcagatcctgggccagctgcagccctccctgcagaccggttccgaggaactgcgttccctgtacaacactatcgctgtgctgtactgcgtgcaccagcgtatcgacgtgaaggacaccaaggaagctctggacaagatcgaggaagaacagaacaagtccaagaagaaggcccagcaggctgctgctgacaccggcaacaactcccaggtgtcccagaactaccccatcgtgcagaacctgcagggccagatggtgcaccaggctatctccccccgtaccctgaacgcttgggtcaaggtggtggaagagaaggctttcagccccgaagtgatccccatgttctccgctctgtccgagggtgctaccccccaggacctgaacaccatgctgaacaccgtgggtggtcaccaggctgctatgcagatgctgaaggaaaccatcaacgaagaggctgctgagtgggaccgtctgcaccccgtgcacgctggtcctatcgctcccggacagatgcgcgagccccgtggttccgacatcgctggaaccacctccaccctgcaagagcagatcggctggatgacccacaacccccccatccccgtgggcgagatctacaagcgttggatcatcctgggcctgaacaagatcgtgcgtatgtactcccccacctccatcctggacatccgtcagggtcccaaggaacccttccgtgactacgtggaccgtttctacaagaccctgcgtgccgagcaggcttcccaagaggtcaagaactggatgaccgagactctgctggtgcagaacgctaaccccgactgcaagaccatcctgaaggctctgggtcccggtgctaccctggaagagatgatgaccgcttgccagggtgtcggtggtcccggtcacaaggctcgtgtgctggctgaggctatgtcccaagtgaccaaccccgctaccatcatgatccagaagggcaacttccgtaaccagcgcaagaccgtgaagtgcttcaactgcggcaaggaaggccacatcgctaagaactgccgtgctccccgcaagaagggctgctggaagtgcggaaaggaaggacaccagatgaaggactgcaccgagcgtcaggctaacttcctgggcaagatctggccctcccacaagggtcgtcccggcaacttcctgcagtcccgtcccgagcccaccgctcccccagaggaatccttccgtttcggcgaggaaaccaccaccccatcccagaagcaagagcccatcgacaaggaactgtaccccctggcttccctgcgctccctgttcggttccgacccatcctcccagcagctgttgaattttgaccttcttaagcttgcgggagacgtcgtcgagtccaaccctgggcccatggaatcccgtggtcgtcgttgccccgagatgatctccgtgctgggtcccatctccggtcacgtcctgaaggctgtgttctcccgtggcgacacccccgtgctgccccacgaaactcgtctgctgcagaccggtatccacgtgcgtgtgtcccagccctccctgatcctggtgtcccagtacacccccgactccaccccttgccaccgcggagacaaccagctgcaggtccagcacacctacttcaccggttccgaggtcgagaacgtgtccgtgaacgtgcacaaccccaccggtcgttccatctgcccctcccaagagcccatgtccatctacgtgtacgctctgcccctgaagatgctgaacatcccctccatcaacgtgcaccactacccctccgctgctgagcgcaagcaccgtcacctccccgtggctgacgctgtgatccacgcttccggcaagcagatgtggcaggctcgtctgaccgtgtccggcctggcttggacccgtcagcagaaccagtggaaggaacccgacgtgtactacacctccgctttcgtgttccccaccaaggacgtggccctgcgtcacgtcgtgtgcgctcacgaactcgtgtgctccatggaaaacacccgtgctaccaagatgcaagtgatcggcgaccagtacgtgaaggtgtacctggaatccttctgcgaggacgtgccctccggcaagctgttcatgcacgtgaccctgggttccgacgtggaagaggacctgaccatgacccgtaacccccagcccttcatgcgtccccacgagcgtaacggtttcaccgtgctgtgccccaagaacatgatcatcaagcccggcaagatctcccacatcatgctggacgtggccttcacctcccacgagcacttcggcctgctgtgccctaagtccatccccggcctgtccatctccggcaacctgctgatgaacggccagcagatcttcctggaagtgcaggctatccgtgaaaccgtcgagctgcgtcagtacgaccctgtggctgctctgttcttcttcgacatcgacctgctgctgcagcgtggtccccagtactccgagcaccccaccttcaccagccagtaccgtatccagggcaagctggaataccgtcacacctgggaccgtcacgacgagggtgctgctcagggcgacgacgacgtgtggacctccggttccgactccgacgaggaactggtcaccaccgagcgcaagaccccccgtgtgaccggtggtggtgctatggctggtgcttccacctccgctggtcgcaagcgcaagtccgcttcctccgctaccgcttgcaccgctggtgtcatgacccgtggtcgcctgaaggctgagtccaccgtggctcccgaagaggacactgacgaggactccgacaacgagatccacaaccccgctgtgttcacctggcccccctggcaggctggtatcctggctcgtaacctggtgcccatggtggctaccgtgcagggccagaacctgaagtaccaagagttcttctgggacgccaacgacatctaccgtatcttcgctgagctggaaggcgtgtggcagcccgctgctcagcccaagcgtcgtcgtcaccgtcaggacgctctgcctggtccctgtatcgcttccacccccaagaagcaccgcggctaaaagcttgtcgagaagtactagaggatcataatcagccataccacatttgtagaggttttacttgctttaaaaaacctcccacacctccccctgaacctgaaacataaaatgaatgcaattgttgttgttaacttgtttattgcagcttataatggttacaaataaagcaatagcatcacaaatttcacaaataaagcatttttttcactgcattctagttgtggtttgtccaaactcatcaatgtatcttatcatgtctggatctgatcactgcttgagcctagaagatccggctgctaacaaagcccgaaaggaagctgagttggctgctgccaccgctgagcaataactatcataacccctaggagatccgaaccagataagtgaaatctagttccaaactattttgtcatttttaattttcgtattagcttacgacgctacacccagttcccatctattttgtcactcttccctaaataatccttaaaaactccatttccacccctcccagttcccaactattttgtccgcccaca

SEQ ID NO: 32 - DNA, 15957 bp, Artificial Sequence
  Synthetic construct
ttgttccagtttggaacaagagtccactattaaagaacgtggactccaacgtcaaagggcgaaaaaccgtctatcagggcgatggcccactacgtgaaccatcaccctaatcaagttttttggggtcgaggtgccgtaaagcactaaatcggaaccctaaagggagcccccgatttagagcttgacggggaaagccggcgaacgtggcgagaaaggaagggaagaaagcgaaaggagcgggcgctagggcgctggcaagtgtagcggtcacgctgcgcgtaaccaccacacccgccgcgcttaatgcgccgctacagggcgcgtccattcgccattcaggctgcgcaactgttgggaagggcgatcggtgcgggcctcttcgctattacgccagctggcgaaagggggatgtgctgcaaggcgattaagttgggtaacgccagggttttcccagtcacgacgttgtaaaacgacggccagtgcatagaccagccgcgtaacctggcaaaatcggttacggttgagtaataaatggatgccctgcgtaagcgggtgtgggcggacaataaagtcttaaactgaacaaaatagatctaaactatgacaataaagtcttaaactagacagaatagttgtaaactgaaatcagtccagttatgctgtgaaaaagcatactggacttttgttatggctaaagcaaactcttcattttctgaagtgcaaattgcccgtcgtattaaagaggggcgtggccaagggcatggtaaagactatattcgcggcgttgtgacaatttaccgaacaactccgcggccgggaagccgatctcggcttgaacgaattgttaggtggcggtacttgggtcgatatcaaagtgcatcacttcttcccgtatgcccaactttgtatagagagccactgcgggatcgtcaccgtaatctgcttgcacgtagatcacataagcaccaagcgcgttggcctcatgcttgaggagattgatgagcgcggtggcaatgccctgcctccggtgctcgccggagactgcgagatcatagatatagatctcactacgcggctgctcaaacttgggcagaacgtaagccgcgagagcgccaacaaccgcttcttggtcgaaggcagcaagcgcgatgaatgtcttactacggagcaagttcccgaggtaatcggagtccggctgatgttgggagtaggtggctacgtctccgaactcacgaccgaaaagatcaagagcagcccgcatggatttgacttggtcagggccgagcctacatgtgcgaatgatgcccatacttgagccacctaactttgttttagggcgactgccctgctgcgtaacatcgttgctgctgcgtaacatcgttgctgctccataacatcaaacatcgacccacggcgtaacgcgcttgctgcttggatgcccgaggcatagactgtacaaaaaaacagtcataacaagccatgaaaaccgccactgcgccgttaccaccgctgcgttcggtcaaggttctggaccagttgcgtgagcgcatacgctacttgcattacagtttacgaaccgaacaggcttatgtcaactgggtttgtgccttcatccgtttccacggtgtgcgtcacccggcaaccttgggcagcagcgaagtcgaggcatttctgtcctggctggcgaacgagcgcaaggtttcggtctccacgcatcgtcaggcattggcggccttgctgttcttctacggcaaggtgctgtgcacggatctgcccttgcttcaggagatcggtagacctcggccgtcgcggcgcttgccggtggtgctgaccccggatgaagtggttcgcatcctcggttttctggaaggcgagcatcgtttgttcgcccaggactctagctatagttctagtggttggctacagctttgtttgtactatcaacaggttgaactgctgatcaacagatcctctacgcggccgcggtaccataacttcgtatagcatacattatacgaagttatctggtttaaacgtacccgtagtggctatggcagggcttgccgccccgacgttggctgcgagccctgggccttcacccgaacttgggggttggggtggggaaaaggaagaaacgcgggcgtattggtcccaatggggtctcggtggggtatcgacagagtgccagccctgggaccgaaccccgcgtttatgaacaaacgacccaacacccgtgcgttttattctgtctttttattgccgtcatagcgcgggttccttccggtattgtctccttccgtgtttcagttagcctcccccatctcccggtaccgcatgctatgcatcagctgctagcttagcgagcgtccacagcctggggaccgtaacgggagtgagcgggcaggttcacacgggtctgcttcagctcagggggcaggccagcgtagtacttgtccaggtgacgcagcaggggggggtccagctggtgacgcaggcagaattccttcacagcgttgtacaggccgtagaacagggtgataccctcgggagcagcagcggtggacacgggcagacgcacagcacggttggtacgggtagcctcgttacggatagccaccaccacgttgaacagggaggggggcaccagctcgaaacccagcacgtgttcggtgaagatggaacgaccgtaggacagacgagtcaggtcgtaaccacggcacaggtcgtccacgcaagtgtacacagcgggggaaccgtcgccgcactcggagtaaccgcgcatcacggtcatccaacggggagcggtgtcggaggacagcagggtcagcagagcacgcagctggtcggggttgttgtacagcagggccagggtgtccaggaaagcgtcgtccagcagcacggagttagcagcctcgggggtcacgggacggtaacggatcagctgggacaggggaccgtccctacgggtcacgttgaccaggggacgcagccaggactcgtacttgtcgccctggaacacctctcccagcaggcaacgacgggtcagctcggggcactcagcgggcaccttctcagccacggtgggagccacggacacggtagcggaggacacgatgggcagcagcaggcagcaccacagcagagccacgggaccgggggagaaggagaaaccgcagtcgggacgacggcacatggtggctcgagatcccgggtgatcaagtcttcgtcgagtgattgtaaataaaatgtaatttacagtatagtattttaattaatatacaaatgatttgataataattcttatttaactataatatattgtgttgggttgaattaaaggtccgtatactagtatcgattcgcgacctactccggaatattaatagatcatggagataattaaaatgataaccatctcgcaaataaataagtattttactgttttcgtaacagttttgtaataaaaaaacctataaatattccggattattcataccgtcccaccatcgggcgcggatccgccaccatgaactccaaggacctgacccccttcctgaccaccctgtggctgctgctggaccactcccgtgtgcctcgtgtgcgtgctgaggaatgctgcgaagtgatcaacgtgaaccacccccccgagcgctgctacgacttcaagatgtgcaacctgttcaccgtggctctgcgttgccccgacggcgaagtgtgctactcccccgaaaagaccgctgagatccgtggtatcgtgaccaccatgacccactccctgacccgtcaagtgatccacaacaagctgaccagctgcaactacaaccccctgtacctcgaggctgacggtcgtatccgttgcggcaaggtgtccgacaaggctcagtacctgctgggtgctgctggttccgtgccctaccgttggatcaacctcgagtacgacaagatcacccgtatcgtgggcctggaccagtacctcgagtccgtgaagaagcacaagcgtctggacgtgtgccgtgctaagatgggttacatgctgcagtaaaagcttgtcgagaagtactagaggatcataatcagccataccacatttgtagaggttttacttgctttaaaaaacctcccacacctccccctgaacctgaaacataaaatgaatgcaattgttgttgttaacttgtttattgcagcttataatggttacaaataaagcaatagcatcacaaatttcacaaataaagcatttttttcactgcattctagttgtggtttgtccaaactcatcaatgtatcttatcatgtctggatctgatcactgcttgagcctagaagatccggctgctaacaaagcccgaaaggaagctgagttggctgctgtggctagctttgtttaactttaagaaggagatacatctagaccggaatattaatagatcatggagataattaaaatgataaccatctcgcaaataaataagtattttactgttttcgtaacagttttgtaataaaaaaacctataaatattccggattattcataccgtcccaccatcgggcgcggatccgccaccatgctgcgtctgctgctgcgtcaccacttccactgcctgctgctgtgcgctgtgtgggctaccccctgcctggcttccccttggtccaccctgaccgctaaccagaacccctccccaccctggtccaagctgacctactccaagccccacgacgctgctaccttctactgccccttcctgtacccatccccccctcgttccccactgcagttctccggtttccagcgtgtgctgaccggtcccgagtgccgtaacgagactctgtacctgctgtacaaccgcgagggccagaccctggtcgagaggtcctccacctgggtcaagaaggtcatctggtacttgtccggtcgtaaccagaccatcctgcagcgtatgccccgtaccgcttccaagccctccgacggcaacgtgcagatctccgtcgaggacgctaagatcttcggtgctcacatggtgcccaagcagaccaagctgctgcgtttcgtggtcaacgacggcacccgttaccagatgtgcgtgatgaagctcgagtcctgggctcacgtgttccgtgactactccgtgtccttccaagtgcgcctgaccttcaccgaggctaacaaccagacctacaccttctgcacccaccccaacctgatcgtgtaaaagcttgtcgagaagtactagaggatcataatcagccataccacatttgtagaggttttacttgctttaaaaaacctcccacacctccccctgaacctgaaacataaaatgaatgcaattgttgttgttaacttgtttattgcagcttataatggttacaaataaagcaatagcatcacaaatttcacaaataaagcatttttttcactgcattctagttgtggtttgtccaaactcatcaatgtatcttatcatgtctggatctgatcactgcttgagcctagaagatccggctgctaacaaagcccgaaaggaagctgagttggctgctgggtgcctaatgagtgagctaactcacattaattgcccggaatattaatagatcatggagataattaaaatgataaccatctcgcaaataaataagtattttactgttttcgtaacagttttgtaataaaaaaacctataaatattccggattattcataccgtcccaccatcgggcgcggatccgccaccatgcgtctgtgccgtgtgtggctgtccgtgtgcctgtgcgctgtggtgctgggccagtgccagcgtgaaaccgctgagaagaacgactactaccgtgtgccccactactgggacgcttgctcccgtgctctgcccgaccagacccgttacaagtacgtcgagcagctggtggacctgaccctgaactaccactacgacgcttcccacggcctggacaacttcgacgtgctgaagcgtatcaacgtgaccgaggtgtccctgctgatctccgacttccgtcgtcagaaccgtcgtggtggcaccaacaagcgtaccaccttcaacgctgctggttccctggctccccacgctcgttccctcgagttctccgtgcgtctgttcgctaactaaaagcttgtcgagaagtactagaggatcataatcagccataccacatttgtagaggttttacttgctttaaaaaacctcccacacctccccctgaacctgaaacataaaatgaatgcaattgttgttgttaacttgtttattgcagcttataatggttacaaataaagcaatagcatcacaaatttcacaaataaagcatttttttcactgcattctagttgtggtttgtccaaactcatcaatgtatcttatcatgtctggatctgatcactgcttgagcctagaagatccggctgctaacaaagcccgaaaggaagctgagttggctgctgccaccgctgagcaataactatcataacccccggaatattaatagatcatggagataattaaaatgataaccatctcgcaaataaataagtattttactgttttcgtaacagttttgtaataaaaaaacctataaatattccggattattcataccgtcccaccatcgggcgcggatcccggtccgaagcgcgcggaattcaaaggcctaccgtcgacgccaccatggaatcccgtatctggtgcctggtcgtgtgcgtgaacctgtgcatcgtgtgcctgggtgctgctgtgtcctcctcctccacccgtggcacctccgctacccactcccaccactcctcccacaccacctccgccgctcactcccgttccggttccgtgtcccagcgtgtgacctcctcccagaccgtgtcccacggtgtcaacgagactatctacaacaccaccctgaagtacggcgacgtcgtgggtgtcaacaccaccaagtacccctaccgtgtgtgctccatggctcagggcaccgacctgatccgtttcgagcgtaacatcgtgtgcacctccatgaagcccatcaacgaggacctggacgagggtatcatggtggtgtacaagcgcaacatcgtggctcacaccttcaaggtccgcgtgtaccagaaggtgctgaccttccgtcgttcctacgcttacatccacaccacttacctgctgggttccaacaccgagtacgtggcccctcccatgtgggagatccaccacatcaactcccactcccagtgctactcctcttactcccgtgtgatcgctggcaccgtgttcgtggcttaccaccgtgactcctacgagaacaagaccatgcagctgatgcccgacgactactccaacacccactccacccgttacgtgaccgtgaaggaccagtggcactcccgtggttccacctggctgtaccgtgaaacctgcaacctgaactgcatggtcaccatcaccaccgctcgttccaagtacccttaccacttcttcgctacctccaccggcgacgtggtggacatctcccccttctacaacggtactaaccgtaacgcttcctacttcggcgagaacgctgacaagttcttcatcttccccaactacaccatcgtgtccgacttcggtcgtcccaactccgctctggaaacccaccgtctggtggctttcttggagcgtgctgactccgtgatctcctgggacatccaggacgagaagaacgtgacctgccagctgaccttctgggaggcttccgagcgtaccatccgttccgaggctgaggactcctaccacttctccagcgctaagatgaccgctaccttcctgtccaagaaacaagaggtcaacatgtccgactccgccctggactgcgtgcgtgacgaggctatcaacaagctgcagcagatcttcaacacctcctacaaccagacctacgagaagtacggaaacgtgtccgtgttcgagactaccggtggcctggtggtgttctggcagggtatcaagcagaagtccctggtcgagctggaacgtctggctaaccgttcctccctgaacctgacccacaaccgtaccaagcgttccaccgacggcaacaacgctactcacctgtccaacatggaatccgtgcacaacctggtgtacgctcagctgcagttcacctacgacaccctgcgcggttacatcaaccgtgctctggctcagatcgctgaggcttggtgcgtggaccagcgtcgtaccctggaagtgttcaaggaactgtccaagatcaacccctccgctatcctgtccgccatctacaacaagcctatcgctgctcgtttcatgggcgacgtgctgggcctggcttcctgcgtgaccatcaaccagacttccgtgaaggtgctgcgtgacatgaacgtgaaggaatcccccggtcgttgctactcccgtcccgtggtcatcttcaacttcgctaactcctcctacgtgcagtacggccagctgggcgaggacaacgagatcctgctgggcaaccaccgtaccgaggaatgccagctgccctccctgaagatcttcatcgctggcaactccgcttacgaatacgtggactacctgttcaagcgcatgatcgacctgtcctccatctctaccgtggactccatgatcgctctggacatcgaccccctggaaaacaccgacttccgtgtgctggaactgtactcccagaaggaactgcgttccatcaacgtgttcgacctggaagagatcatgcgcgagttcaactcctacaagcagcgtgttaagtacgtcgaggacaaggtggtggaccccctgcccccctacctgaagggactggacgacctgatgtccggcctgggagctgccggcaaggctgtgggtgtcgctatcggtgctgtgggtggtgctgtggcttccgtggtcgagggtgtcgccaccttcctgaagaaccccttcggtgctttcaccatcatcctggtggctatcgctgtggtcatcatcatctacctgatctacacccgtcagcgtcgtctgtgcatgcagcccctgcagaacctgttcccctacctggtgtccgctgacggtactaccgtgacctccggcaacaccaaggacacctccctgcaggctcccccatcctacgaggaatccgtctacaactccggtcgcaagggtcccggtcccccttcctccgacgcttctaccgctgctcccccatacaccaacgagcaggcttaccagatgctgctggctctcgtgcgtctggacgctgagcagcgtgcacagcagaacggcaccgactccctggacggccagaccggaacccaggacaagggccagaagcccaacctgctggaccgtctgcgtcaccgcaagaacggttaccgtcacctgaaggactccgacgaggaagagaacgtctaaggcgcgccaagcttgtcgagaagtactagagatcataatcagccataccacatttgtagaggttttacttgctttaaaaaacctcccacacctccccctgaacctgaaacataaaatgaatgcaattgttgttgttaacttgtttattgcagcttataatggttacaaataaagcaatagcatcacaaatttcacaaataaagcatttttttcactgcattctagttgtggtttgtccaaactcatcaatgtatcttatcatgtctggatctgatcactgcttgagcctagaagatccggctgctaacaaagcccgaaaggaagctgggaatattaatagatcatggagataattaaaatgataaccatctcgcaaataaataagtattttactgttttcgtaacagttttgtaataaaaaaacctataaatattccggattattcataccgtcccaccatcgggcgcggatccgccaccatgcgtcccggcctgccctcctacctgatcgtgctggctgtgtgcctgctgtcccacctcctgtcctcccgttacggtgctgaggctatctccgagcccctggacaaggctttccacctcctgctgaacacctacggtcgtcctatccgtttcctgcgcgagaacaccacccagtgcacctacaactcctccctgcgcaactccaccgtcgtccgcgagaacgctatctccttcaacttcttccagtcctacaaccagtactacgtgttccacatgccccgttgcctgttcgctggtcccctggctgagcagttcctgaaccaggtggacctgaccgagactctcgagcgttaccagcagcgtctgaacacttacgctctggtgtccaaggacctggcttcctaccgttccttcagccagcagctgaaggctcaggactccctgggcgagcagcccaccactgtgcctccccctatcgacctgtccatcccccacgtgtggatgcccccccagaccactcctcacggctggaccgagtcccacaccacctccggactgcaccgtccccacttcaaccagacctgcatcctgttcgacggtcacgacctgctgttctccaccgtgaccccctgcctgcaccagggcttctacctcatcgacgagctgcgttacgtgaagatcaccctgaccgaggatttcttcgtggtcaccgtgtccatcgacgacgacacccccatgctgctgatcttcggtcacctcccccgtgtgctgttcaaggctccctaccagcgtgacaacttcatcctgcgtcagaccgagaagcacgagctgctggtgctggtcaagaaggaccagctgaaccgtcactcttacctgaaggaccccgacttcctggacgctgctctggacttcaactacctggacctgtccgctctgctgaggaactccttccaccgttacgctgtggacgtgctgaagtccggtcgttgccagatgctggaccgtcgtaccgtcgagatggctttcgcttacgccctggctctgttcgctgctgctcgtcaagaagaggctggcgctcaggtgtccgtgccccgtgctctggaccgtcaggctgctctgctgcagatccaagagttcatgatcacttgcctgtcccagaccccccctcgtaccaccctgctgctgtaccccaccgctgtggacctggctaagcgtgctctgtggacccccaaccagatcaccgacatcacctccctcgtgcgtctggtgtacatcctgtccaagcagaaccagcagcacctgatcccccagtgggctctgcgtcagatcgctgacttcgctctgaagctgcacaagacccacctggcttcattcctcagcgctttcgctcgccaagagctgtacctgatgggttccctggtgcactccatgctggtgcacaccaccgagcgtcgcgagatcttcatcgtggaaaccggcctgtgctccctggccgagctgtcccacttcacccagctgctggctcacccccaccacgagtacctgtccgacctgtacaccccctgctcctcttccggtcgtcgtgaccactccctggaacgtctgacccgtctgttccccgacgctaccgtgcctaccaccgtgcctgctgctctgtccatcctgtctaccatgcagccctccaccctggaaaccttccccgacctgttctgcctgcctctgggcgagtccttctccgctctgaccgtgtccgagcacgtgtcctacgtggtcaccaaccagtacctgatcaagggcatctcctaccccgtgtccaccaccgtcgtgggccagtccctgatcatcacccagaccgactcccagaccaagtgcgagctgacccgtaacatgcacaccactcactccatcaccgctgctctgaacatctccctcgagaactgcgctttctgccagtccgctctgttggagtacgacgacactcagggtgtcatcaacatcatgtacatgcacgactccgacgacgtgctgttcgctctggacccctacaacgaggtggtggtgtcctccccccgtacccactacctgatgctgctgaagaacggcaccgtgctggaagtgaccgacgtggtggtggacgctaccgaccgtctgctgatgatgtccgtgtacgctctgtccgctatcatcggcatctacctgctgtaccgtatgctgaagacctgccagctgttgaattttgaccttcttaagcttgcgggagacgtcgagtccaaccctgggcccatgggtgctcgtgcttcagtgctgtccggtggcgagctggacaagtgggagaagatccgtctgcgtcccggtggcaagaagcagtacaagctgaagcacatcgtgtgggcttcccgcgagctggaacgtttcgctgtgaaccccggcctgctggaaacctccgagggttgccgtcagatcctgggccagctgcagccctccctgcagaccggttccgaggaactgcgttccctgtacaacactatcgctgtgctgtactgcgtgcaccagcgtatcgacgtgaaggacaccaaggaagctctggacaagatcgaggaagaacagaacaagtccaagaagaaggcccagcaggctgctgctgacaccggcaacaactcccaggtgtcccagaactaccccatcgtgcagaacctgcagggccagatggtgcaccaggctatctccccccgtaccctgaacgcttgggtcaaggtggtggaagagaaggctttcagccccgaagtgatccccatgttctccgctctgtccgagggtgctaccccccaggacctgaacaccatgctgaacaccgtgggtggtcaccaggctgctatgcagatgctgaaggaaaccatcaacgaagaggctgctgagtgggaccgtctgcaccccgtgcacgctggtcctatcgctcccggacagatgcgcgagccccgtggttccgacatcgctggaaccacctccaccctgcaagagcagatcggctggatgacccacaacccccccatccccgtgggcgagatctacaagcgttggatcatcctgggcctgaacaagatcgtgcgtatgtactcccccacctccatcctggacatccgtcagggtcccaaggaacccttccgtgactacgtggaccgtttctacaagaccctgcgtgccgagcaggcttcccaagaggtcaagaactggatgaccgagactctgctggtgcagaacgctaaccccgactgcaagaccatcctgaaggctctgggtcccggtgctaccctggaagagatgatgaccgcttgccagggtgtcggtggtcccggtcacaaggctcgtgtgctggctgaggctatgtcccaagtgaccaaccccgctaccatcatgatccagaagggcaacttccgtaaccagcgcaagaccgtgaagtgcttcaactgcggcaaggaaggccacatcgctaagaactgccgtgctccccgcaagaagggctgctggaagtgcggaaaggaaggacaccagatgaaggactgcaccgagcgtcaggctaacttcctgggcaagatctggccctcccacaagggtcgtcccggcaacttcctgcagtcccgtcccgagcccaccgctcccccagaggaatccttccgtttcggcgaggaaaccaccaccccatcccagaagcaagagcccatcgacaaggaactgtaccccctggcttccctgcgctccctgttcggttccgacccatcctcccagcagctgttgaattttgaccttcttaagcttgcgggagacgtcgtcgagtccaaccctgggcccatggaatcccgtggtcgtcgttgccccgagatgatctccgtgctgggtcccatctccggtcacgtcctgaaggctgtgttctcccgtggcgacacccccgtgctgccccacgaaactcgtctgctgcagaccggtatccacgtgcgtgtgtcccagccctccctgatcctggtgtcccagtacacccccgactccaccccttgccaccgcggagacaaccagctgcaggtccagcacacctacttcaccggttccgaggtcgagaacgtgtccgtgaacgtgcacaaccccaccggtcgttccatctgcccctcccaagagcccatgtccatctacgtgtacgctctgcccctgaagatgctgaacatcccctccatcaacgtgcaccactacccctccgctgctgagcgcaagcaccgtcacctccccgtggctgacgctgtgatccacgcttccggcaagcagatgtggcaggctcgtctgaccgtgtccggcctggcttggacccgtcagcagaaccagtggaaggaacccgacgtgtactacacctccgctttcgtgttccccaccaaggacgtggccctgcgtcacgtcgtgtgcgctcacgaactcgtgtgctccatggaaaacacccgtgctaccaagatgcaagtgatcggcgaccagtacgtgaaggtgtacctggaatccttctgcgaggacgtgccctccggcaagctgttcatgcacgtgaccctgggttccgacgtggaagaggacctgaccatgacccgtaacccccagcccttcatgcgtccccacgagcgtaacggtttcaccgtgctgtgccccaagaacatgatcatcaagcccggcaagatctcccacatcatgctggacgtggccttcacctcccacgagcacttcggcctgctgtgccctaagtccatccccggcctgtccatctccggcaacctgctgatgaacggccagcagatcttcctggaagtgcaggctatccgtgaaaccgtcgagctgcgtcagtacgaccctgtggctgctctgttcttcttcgacatcgacctgctgctgcagcgtggtccccagtactccgagcaccccaccttcaccagccagtaccgtatccagggcaagctggaataccgtcacacctgggaccgtcacgacgagggtgctgctcagggcgacgacgacgtgtggacctccggttccgactccgacgaggaactggtcaccaccgagcgcaagaccccccgtgtgaccggtggtggtgctatggctggtgcttccacctccgctggtcgcaagcgcaagtccgcttcctccgctaccgcttgcaccgctggtgtcatgacccgtggtcgcctgaaggctgagtccaccgtggctcccgaagaggacactgacgaggactccgacaacgagatccacaaccccgctgtgttcacctggcccccctggcaggctggtatcctggctcgtaacctggtgcccatggtggctaccgtgcagggccagaacctgaagtaccaagagttcttctgggacgccaacgacatctaccgtatcttcgctgagctggaaggcgtgtggcagcccgctgctcagcccaagcgtcgtcgtcaccgtcaggacgctctgcctggtccctgtatcgcttccacccccaagaagcaccgcggctaaaagcttgtcgagaagtactagaggatcataatcagccataccacatttgtagaggttttacttgctttaaaaaacctcccacacctccccctgaacctgaaacataaaatgaatgcaattgttgttgttaacttgtttattgcagcttataatggttacaaataaagcaatagcatcacaaatttcacaaataaagcatttttttcactgcattctagttgtggtttgtccaaactcatcaatgtatcttatcatgtctggatctgatcactgcttgagcctagaagatccggctgctaacaaagcccgaaaggaagctgagttggctgctgccaccgctgagcaataactatcataacccctaggagatccgaaccagataagtgaaatctagttccaaactattttgtcatttttaattttcgtattagcttacgacgctacacccagttcccatctattttgtcactcttccctaaataatccttaaaaactccatttccacccctcccagttcccaactattttgtccgcccaca

SEQ ID NO: 33 - DNA, 15978 bp, Artificial Sequence
  Synthetic construct
ttgttccagtttggaacaagagtccactattaaagaacgtggactccaacgtcaaagggcgaaaaaccgtctatcagggcgatggcccactacgtgaaccatcaccctaatcaagttttttggggtcgaggtgccgtaaagcactaaatcggaaccctaaagggagcccccgatttagagcttgacggggaaagccggcgaacgtggcgagaaaggaagggaagaaagcgaaaggagcgggcgctagggcgctggcaagtgtagcggtcacgctgcgcgtaaccaccacacccgccgcgcttaatgcgccgctacagggcgcgtccattcgccattcaggctgcgcaactgttgggaagggcgatcggtgcgggcctcttcgctattacgccagctggcgaaagggggatgtgctgcaaggcgattaagttgggtaacgccagggttttcccagtcacgacgttgtaaaacgacggccagtgcatagaccagccgcgtaacctggcaaaatcggttacggttgagtaataaatggatgccctgcgtaagcgggtgtgggcggacaataaagtcttaaactgaacaaaatagatctaaactatgacaataaagtcttaaactagacagaatagttgtaaactgaaatcagtccagttatgctgtgaaaaagcatactggacttttgttatggctaaagcaaactcttcattttctgaagtgcaaattgcccgtcgtattaaagaggggcgtggccaagggcatggtaaagactatattcgcggcgttgtgacaatttaccgaacaactccgcggccgggaagccgatctcggcttgaacgaattgttaggtggcggtacttgggtcgatatcaaagtgcatcacttcttcccgtatgcccaactttgtatagagagccactgcgggatcgtcaccgtaatctgcttgcacgtagatcacataagcaccaagcgcgttggcctcatgcttgaggagattgatgagcgcggtggcaatgccctgcctccggtgctcgccggagactgcgagatcatagatatagatctcactacgcggctgctcaaacttgggcagaacgtaagccgcgagagcgccaacaaccgcttcttggtcgaaggcagcaagcgcgatgaatgtcttactacggagcaagttcccgaggtaatcggagtccggctgatgttgggagtaggtggctacgtctccgaactcacgaccgaaaagatcaagagcagcccgcatggatttgacttggtcagggccgagcctacatgtgcgaatgatgcccatacttgagccacctaactttgttttagggcgactgccctgctgcgtaacatcgttgctgctgcgtaacatcgttgctgctccataacatcaaacatcgacccacggcgtaacgcgcttgctgcttggatgcccgaggcatagactgtacaaaaaaacagtcataacaagccatgaaaaccgccactgcgccgttaccaccgctgcgttcggtcaaggttctggaccagttgcgtgagcgcatacgctacttgcattacagtttacgaaccgaacaggcttatgtcaactgggtttgtgccttcatccgtttccacggtgtgcgtcacccggcaaccttgggcagcagcgaagtcgaggcatttctgtcctggctggcgaacgagcgcaaggtttcggtctccacgcatcgtcaggcattggcggccttgctgttcttctacggcaaggtgctgtgcacggatctgcccttgcttcaggagatcggtagacctcggccgtcgcggcgcttgccggtggtgctgaccccggatgaagtggttcgcatcctcggttttctggaaggcgagcatcgtttgttcgcccaggactctagctatagttctagtggttggctacagctttgtttgtactatcaacaggttgaactgctgatcaacagatcctctacgcggccgcggtaccataacttcgtatagcatacattatacgaagttatctggtttaaacgtacccgtagtggctatggcagggcttgccgccccgacgttggctgcgagccctgggccttcacccgaacttgggggttggggtggggaaaaggaagaaacgcgggcgtattggtcccaatggggtctcggtggggtatcgacagagtgccagccctgggaccgaaccccgcgtttatgaacaaacgacccaacacccgtgcgttttattctgtctttttattgccgtcatagcgcgggttccttccggtattgtctccttccgtgtttcagttagcctcccccatctcccggtaccgcatgctatgcatcagctgctagcttagcgagcgtccacagcctggggaccgtaacgggagtgagcgggcaggttcacacgggtctgcttcagctcagggggcaggccagcgtagtacttgtccaggtgacgcagcaggggggggtccagctggtgacgcaggcagaattccttcacagcgttgtacaggccgtagaacagggtgataccctcgggagcagcagcggtggacacgggcagacgcacagcacggttggtacgggtagcctcgttacggatagccaccaccacgttgaacagggaggggggcaccagctcgaaacccagcacgtgttcggtgaagatggaacgaccgtaggacagacgagtcaggtcgtaaccacggcacaggtcgtccacgcaagtgtacacagcgggggaaccgtcgccgcactcggagtaaccgcgcatcacggtcatccaacggggagcggtgtcggaggacagcagggtcagcagagcacgcagctggtcggggttgttgtacagcagggccagggtgtccaggaaagcgtcgtccagcagcacggagttagcagcctcgggggtcacgggacggtaacggatcagctgggacaggggaccgtccctacgggtcacgttgaccaggggacgcagccaggactcgtacttgtcgccctggaacacctctcccagcaggcaacgacgggtcagctcggggcactcagcgggcaccttctcagccacggtgggagccacggacacggtagcggaggacacgatgggcagcagcaggcagcaccacagcagagccacgggaccgggggagaaggagaaaccgcagtcgggacgacggcacatggtggctcgagatcccgggtgatcaagtcttcgtcgagtgattgtaaataaaatgtaatttacagtatagtattttaattaatatacaaatgatttgataataattcttatttaactataatatattgtgttgggttgaattaaaggtccgtatactagtatcgattcgcgacctactccggaatattaatagatcatggagataattaaaatgataaccatctcgcaaataaataagtattttactgttttcgtaacagttttgtaataaaaaaacctataaatattccggattattcataccgtcccaccatcgggcgcggatccgccaccatgaactccaaggacctgacccccttcctgaccaccctgtggctgctgctggaccactcccgtgtgcctcgtgtgcgtgctgaggaatgctgcgaagtgatcaacgtgaaccacccccccgagcgctgctacgacttcaagatgtgcaacctgttcaccgtggctctgcgttgccccgacggcgaagtgtgctactcccccgaaaagaccgctgagatccgtggtatcgtgaccaccatgacccactccctgacccgtcaagtgatccacaacaagctgaccagctgcaactacaaccccctgtacctcgaggctgacggtcgtatccgttgcggcaaggtgtccgacaaggctcagtacctgctgggtgctgctggttccgtgccctaccgttggatcaacctcgagtacgacaagatcacccgtatcgtgggcctggaccagtacctcgagtccgtgaagaagcacaagcgtctggacgtgtgccgtgctaagatgggttacatgctgcagtaaaagcttgtcgagaagtactagaggatcataatcagccataccacatttgtagaggttttacttgctttaaaaaacctcccacacctccccctgaacctgaaacataaaatgaatgcaattgttgttgttaacttgtttattgcagcttataatggttacaaataaagcaatagcatcacaaatttcacaaataaagcatttttttcactgcattctagttgtggtttgtccaaactcatcaatgtatcttatcatgtctggatctgatcactgcttgagcctagaagatccggctgctaacaaagcccgaaaggaagctgagttggctgctgtggctagctttgtttaactttaagaaggagatacatctagaccggaatattaatagatcatggagataattaaaatgataaccatctcgcaaataaataagtattttactgttttcgtaacagttttgtaataaaaaaacctataaatattccggattattcataccgtcccaccatcgggcgcggatccgccaccatgctgcgtctgctgctgcgtcaccacttccactgcctgctgctgtgcgctgtgtgggctaccccctgcctggcttccccctggttcaccctgaccgctaaccagaacccctccccaccctggtccaagctgacctaccccaagccccacgacgctgctaccttctactgccccttcctgtacccatccccacctcgttccccatcccagttctccggtttccagcgtgtgtccaccggtcccgagtgccgtaacgagactctgtacctgctgtacaaccgcgagggccagaccctggtcgagaggtcctccacctgggtcaagaaggtcatctggtacttgtccggtcgtaaccagaccatcctgcagcgtatgccccgtaccgcttccaagccctccgacggcaacgtgcagatctccgtcgaggacgctaagatcttcggtgctcacatggtgcccaagcagaccaagctgctgcgtttcgtggtcaacgacggcacccgttaccagatgtgcgtgatgaagctggaatcctgggctcacgtgttccgtgactactccgtgtccttccaagtgcgcctgaccttcaccgaggctaacaaccagacctacaccttctgcacccaccccaacctgatcgtgtaagtcgacaagcttgtcgagaagtactagaggatcataatcagccataccacatttgtagaggttttacttgctttaaaaaacctcccacacctccccctgaacctgaaacataaaatgaatgcaattgttgttgttaacttgtttattgcagcttataatggttacaaataaagcaatagcatcacaaatttcacaaataaagcatttttttcactgcattctagttgtggtttgtccaaactcatcaatgtatcttatcatgtctggatctgatcactgcttgagcctagaagatccggctgctaacaaagcccgaaaggaagctgagttggctgctgggtgcctaatgagtgagctaactcacattaattgcccggaatattaatagatcatggagataattaaaatgataaccatctcgcaaataaataagtattttactgttttcgtaacagttttgtaataaaaaaacctataaatattccggattattcataccgtcccaccatcgggcgcggatccgccaccggatccgccaccatgcgtctgtgccgtgtgtggctgtccgtgtgcctgtgcgctgtggtgctgggacagtgccagcgtgaaaccgctgagaagaacgactactaccgtgtgccccactactgggacgcttgctcccgtgctctgcccgaccagacccgttacaagtacgtcgagcagctggtggacctgaccctgaactaccactacgacgcttcccacggcctggacaacttcgacgtgctgaagcgtatcaacgtgaccgaggtgtccctgctgatctccgacttccgtcgtcagaaccgtcgtggtggcaccaacaagcgtaccaccttcaacgctgctggttccctggctccccacgctcgttccttggagttctccgtgcgtctgttcgccaactaataaaagcttgtcgagaagtactagaggatcataatcagccataccacatttgtagaggttttacttgctttaaaaaacctcccacacctccccctgaacctgaaacataaaatgaatgcaattgttgttgttaacttgtttattgcagcttataatggttacaaataaagcaatagcatcacaaatttcacaaataaagcatttttttcactgcattctagttgtggtttgtccaaactcatcaatgtatcttatcatgtctggatctgatcactgcttgagcctagaagatccggctgctaacaaagcccgaaaggaagctgagttggctgctgccaccgctgagcaataactatcataacccccggaatattaatagatcatggagataattaaaatgataaccatctcgcaaataaataagtattttactgttttcgtaacagttttgtaataaaaaaacctataaatattccggattattcataccgtcccaccatcgggcgcggatcccggtccgaagcgcgcggaattcaaaggcctaccgtcgacgccaccatggaatcccgtatctggtgcctggtcgtgtgcgtgaacctgtgcatcgtgtgcctgggtgctgctgtgtcctcctcctccacccgtggcacctccgctacccactcccaccactcctcccacaccacctccgccgctcactcccgttccggttccgtgtcccagcgtgtgacctcctcccagaccgtgtcccacggtgtcaacgagactatctacaacaccaccctgaagtacggcgacgtcgtgggtgtcaacaccaccaagtacccctaccgtgtgtgctccatggctcagggcaccgacctgatccgtttcgagcgtaacatcgtgtgcacctccatgaagcccatcaacgaggacctggacgagggtatcatggtggtgtacaagcgcaacatcgtggctcacaccttcaaggtccgcgtgtaccagaaggtgctgaccttccgtcgttcctacgcttacatccacaccacttacctgctgggttccaacaccgagtacgtggcccctcccatgtgggagatccaccacatcaactcccactcccagtgctactcctcttactcccgtgtgatcgctggcaccgtgttcgtggcttaccaccgtgactcctacgagaacaagaccatgcagctgatgcccgacgactactccaacacccactccacccgttacgtgaccgtgaaggaccagtggcactcccgtggttccacctggctgtaccgtgaaacctgcaacctgaactgcatggtcaccatcaccaccgctcgttccaagtacccttaccacttcttcgctacctccaccggcgacgtggtggacatctcccccttctacaacggtactaaccgtaacgcttcctacttcggcgagaacgctgacaagttcttcatcttccccaactacaccatcgtgtccgacttcggtcgtcccaactccgctctggaaacccaccgtctggtggctttcttggagcgtgctgactccgtgatctcctgggacatccaggacgagaagaacgtgacctgccagctgaccttctgggaggcttccgagcgtaccatccgttccgaggctgaggactcctaccacttctccagcgctaagatgaccgctaccttcctgtccaagaaacaagaggtcaacatgtccgactccgccctggactgcgtgcgtgacgaggctatcaacaagctgcagcagatcttcaacacctcctacaaccagacctacgagaagtacggaaacgtgtccgtgttcgagactaccggtggcctggtggtgttctggcagggtatcaagcagaagtccctggtcgagctggaacgtctggctaaccgttcctccctgaacctgacccacaaccgtaccaagcgttccaccgacggcaacaacgctactcacctgtccaacatggaatccgtgcacaacctggtgtacgctcagctgcagttcacctacgacaccctgcgcggttacatcaaccgtgctctggctcagatcgctgaggcttggtgcgtggaccagcgtcgtaccctggaagtgttcaaggaactgtccaagatcaacccctccgctatcctgtccgccatctacaacaagcctatcgctgctcgtttcatgggcgacgtgctgggcctggcttcctgcgtgaccatcaaccagacttccgtgaaggtgctgcgtgacatgaacgtgaaggaatcccccggtcgttgctactcccgtcccgtggtcatcttcaacttcgctaactcctcctacgtgcagtacggccagctgggcgaggacaacgagatcctgctgggcaaccaccgtaccgaggaatgccagctgccctccctgaagatcttcatcgctggcaactccgcttacgaatacgtggactacctgttcaagcgcatgatcgacctgtcctccatctctaccgtggactccatgatcgctctggacatcgaccccctggaaaacaccgacttccgtgtgctggaactgtactcccagaaggaactgcgttccatcaacgtgttcgacctggaagagatcatgcgcgagttcaactcctacaagcagcgtgttaagtacgtcgaggacaaggtggtggaccccctgcccccctacctgaagggactggacgacctgatgtccggcctgggagctgccggcaaggctgtgggtgtcgctatcggtgctgtgggtggtgctgtggcttccgtggtcgagggtgtcgccaccttcctgaagaaccccttcggtgctttcaccatcatcctggtggctatcgctgtggtcatcatcatctacctgatctacacccgtcagcgtcgtctgtgcatgcagcccctgcagaacctgttcccctacctggtgtccgctgacggtactaccgtgacctccggcaacaccaaggacacctccctgcaggctcccccatcctacgaggaatccgtctacaactccggtcgcaagggtcccggtcccccttcctccgacgcttctaccgctgctcccccatacaccaacgagcaggcttaccagatgctgctggctctcgtgcgtctggacgctgagcagcgtgcacagcagaacggcaccgactccctggacggccagaccggaacccaggacaagggccagaagcccaacctgctggaccgtctgcgtcaccgcaagaacggttaccgtcacctgaaggactccgacgaggaagagaacgtctaaggcgcgccaagcttgtcgagaagtactagagatcataatcagccataccacatttgtagaggttttacttgctttaaaaaacctcccacacctccccctgaacctgaaacataaaatgaatgcaattgttgttgttaacttgtttattgcagcttataatggttacaaataaagcaatagcatcacaaatttcacaaataaagcatttttttcactgcattctagttgtggtttgtccaaactcatcaatgtatcttatcatgtctggatctgatcactgcttgagcctagaagatccggctgctaacaaagcccgaaaggaagctgggaatattaatagatcatggagataattaaaatgataaccatctcgcaaataaataagtattttactgttttcgtaacagttttgtaataaaaaaacctataaatattccggattattcataccgtcccaccatcgggcgcggatccgccaccatgcgtcccggcctgccctcctacctgatcgtgctggctgtgtgcctgctgtcccacctcctgtcctcccgttacggtgctgaggctatctccgagcccctggacaaggctttccacctcctgctgaacacctacggtcgtcctatccgtttcctgcgcgagaacaccacccagtgcacctacaactcctccctgcgcaactccaccgtcgtccgcgagaacgctatctccttcaacttcttccagtcctacaaccagtactacgtgttccacatgccccgttgcctgttcgctggtcccctggctgagcagttcctgaaccaggtggacctgaccgagactctcgagcgttaccagcagcgtctgaacacttacgctctggtgtccaaggacctggcttcctaccgttccttcagccagcagctgaaggctcaggactccctgggcgagcagcccaccactgtgcctccccctatcgacctgtccatcccccacgtgtggatgcccccccagaccactcctcacggctggaccgagtcccacaccacctccggactgcaccgtccccacttcaaccagacctgcatcctgttcgacggtcacgacctgctgttctccaccgtgaccccctgcctgcaccagggcttctacctcatcgacgagctgcgttacgtgaagatcaccctgaccgaggatttcttcgtggtcaccgtgtccatcgacgacgacacccccatgctgctgatcttcggtcacctcccccgtgtgctgttcaaggctccctaccagcgtgacaacttcatcctgcgtcagaccgagaagcacgagctgctggtgctggtcaagaaggaccagctgaaccgtcactcttacctgaaggaccccgacttcctggacgctgctctggacttcaactacctggacctgtccgctctgctgaggaactccttccaccgttacgctgtggacgtgctgaagtccggtcgttgccagatgctggaccgtcgtaccgtcgagatggctttcgcttacgccctggctctgttcgctgctgctcgtcaagaagaggctggcgctcaggtgtccgtgccccgtgctctggaccgtcaggctgctctgctgcagatccaagagttcatgatcacttgcctgtcccagaccccccctcgtaccaccctgctgctgtaccccaccgctgtggacctggctaagcgtgctctgtggacccccaaccagatcaccgacatcacctccctcgtgcgtctggtgtacatcctgtccaagcagaaccagcagcacctgatcccccagtgggctctgcgtcagatcgctgacttcgctctgaagctgcacaagacccacctggcttcattcctcagcgctttcgctcgccaagagctgtacctgatgggttccctggtgcactccatgctggtgcacaccaccgagcgtcgcgagatcttcatcgtggaaaccggcctgtgctccctggccgagctgtcccacttcacccagctgctggctcacccccaccacgagtacctgtccgacctgtacaccccctgctcctcttccggtcgtcgtgaccactccctggaacgtctgacccgtctgttccccgacgctaccgtgcctaccaccgtgcctgctgctctgtccatcctgtctaccatgcagccctccaccctggaaaccttccccgacctgttctgcctgcctctgggcgagtccttctccgctctgaccgtgtccgagcacgtgtcctacgtggtcaccaaccagtacctgatcaagggcatctcctaccccgtgtccaccaccgtcgtgggccagtccctgatcatcacccagaccgactcccagaccaagtgcgagctgacccgtaacatgcacaccactcactccatcaccgctgctctgaacatctccctcgagaactgcgctttctgccagtccgctctgttggagtacgacgacactcagggtgtcatcaacatcatgtacatgcacgactccgacgacgtgctgttcgctctggacccctacaacgaggtggtggtgtcctccccccgtacccactacctgatgctgctgaagaacggcaccgtgctggaagtgaccgacgtggtggtggacgctaccgaccgtctgctgatgatgtccgtgtacgctctgtccgctatcatcggcatctacctgctgtaccgtatgctgaagacctgccagctgttgaattttgaccttcttaagcttgcgggagacgtcgagtccaaccctgggcccatgggtgctcgtgcttcagtgctgtccggtggcgagctggacaagtgggagaagatccgtctgcgtcccggtggcaagaagcagtacaagctgaagcacatcgtgtgggcttcccgcgagctggaacgtttcgctgtgaaccccggcctgctggaaacctccgagggttgccgtcagatcctgggccagctgcagccctccctgcagaccggttccgaggaactgcgttccctgtacaacactatcgctgtgctgtactgcgtgcaccagcgtatcgacgtgaaggacaccaaggaagctctggacaagatcgaggaagaacagaacaagtccaagaagaaggcccagcaggctgctgctgacaccggcaacaactcccaggtgtcccagaactaccccatcgtgcagaacctgcagggccagatggtgcaccaggctatctccccccgtaccctgaacgcttgggtcaaggtggtggaagagaaggctttcagccccgaagtgatccccatgttctccgctctgtccgagggtgctaccccccaggacctgaacaccatgctgaacaccgtgggtggtcaccaggctgctatgcagatgctgaaggaaaccatcaacgaagaggctgctgagtgggaccgtctgcaccccgtgcacgctggtcctatcgctcccggacagatgcgcgagccccgtggttccgacatcgctggaaccacctccaccctgcaagagcagatcggctggatgacccacaacccccccatccccgtgggcgagatctacaagcgttggatcatcctgggcctgaacaagatcgtgcgtatgtactcccccacctccatcctggacatccgtcagggtcccaaggaacccttccgtgactacgtggaccgtttctacaagaccctgcgtgccgagcaggcttcccaagaggtcaagaactggatgaccgagactctgctggtgcagaacgctaaccccgactgcaagaccatcctgaaggctctgggtcccggtgctaccctggaagagatgatgaccgcttgccagggtgtcggtggtcccggtcacaaggctcgtgtgctggctgaggctatgtcccaagtgaccaaccccgctaccatcatgatccagaagggcaacttccgtaaccagcgcaagaccgtgaagtgcttcaactgcggcaaggaaggccacatcgctaagaactgccgtgctccccgcaagaagggctgctggaagtgcggaaaggaaggacaccagatgaaggactgcaccgagcgtcaggctaacttcctgggcaagatctggccctcccacaagggtcgtcccggcaacttcctgcagtcccgtcccgagcccaccgctcccccagaggaatccttccgtttcggcgaggaaaccaccaccccatcccagaagcaagagcccatcgacaaggaactgtaccccctggcttccctgcgctccctgttcggttccgacccatcctcccagcagctgttgaattttgaccttcttaagcttgcgggagacgtcgtcgagtccaaccctgggcccatggaatcccgtggtcgtcgttgccccgagatgatctccgtgctgggtcccatctccggtcacgtcctgaaggctgtgttctcccgtggcgacacccccgtgctgccccacgaaactcgtctgctgcagaccggtatccacgtgcgtgtgtcccagccctccctgatcctggtgtcccagtacacccccgactccaccccttgccaccgcggagacaaccagctgcaggtccagcacacctacttcaccggttccgaggtcgagaacgtgtccgtgaacgtgcacaaccccaccggtcgttccatctgcccctcccaagagcccatgtccatctacgtgtacgctctgcccctgaagatgctgaacatcccctccatcaacgtgcaccactacccctccgctgctgagcgcaagcaccgtcacctccccgtggctgacgctgtgatccacgcttccggcaagcagatgtggcaggctcgtctgaccgtgtccggcctggcttggacccgtcagcagaaccagtggaaggaacccgacgtgtactacacctccgctttcgtgttccccaccaaggacgtggccctgcgtcacgtcgtgtgcgctcacgaactcgtgtgctccatggaaaacacccgtgctaccaagatgcaagtgatcggcgaccagtacgtgaaggtgtacctggaatccttctgcgaggacgtgccctccggcaagctgttcatgcacgtgaccctgggttccgacgtggaagaggacctgaccatgacccgtaacccccagcccttcatgcgtccccacgagcgtaacggtttcaccgtgctgtgccccaagaacatgatcatcaagcccggcaagatctcccacatcatgctggacgtggccttcacctcccacgagcacttcggcctgctgtgccctaagtccatccccggcctgtccatctccggcaacctgctgatgaacggccagcagatcttcctggaagtgcaggctatccgtgaaaccgtcgagctgcgtcagtacgaccctgtggctgctctgttcttcttcgacatcgacctgctgctgcagcgtggtccccagtactccgagcaccccaccttcaccagccagtaccgtatccagggcaagctggaataccgtcacacctgggaccgtcacgacgagggtgctgctcagggcgacgacgacgtgtggacctccggttccgactccgacgaggaactggtcaccaccgagcgcaagaccccccgtgtgaccggtggtggtgctatggctggtgcttccacctccgctggtcgcaagcgcaagtccgcttcctccgctaccgcttgcaccgctggtgtcatgacccgtggtcgcctgaaggctgagtccaccgtggctcccgaagaggacactgacgaggactccgacaacgagatccacaaccccgctgtgttcacctggcccccctggcaggctggtatcctggctcgtaacctggtgcccatggtggctaccgtgcagggccagaacctgaagtaccaagagttcttctgggacgccaacgacatctaccgtatcttcgctgagctggaaggcgtgtggcagcccgctgctcagcccaagcgtcgtcgtcaccgtcaggacgctctgcctggtccctgtatcgcttccacccccaagaagcaccgcggctaaaagcttgtcgagaagtactagaggatcataatcagccataccacatttgtagaggttttacttgctttaaaaaacctcccacacctccccctgaacctgaaacataaaatgaatgcaattgttgttgttaacttgtttattgcagcttataatggttacaaataaagcaatagcatcacaaatttcacaaataaagcatttttttcactgcattctagttgtggtttgtccaaactcatcaatgtatcttatcatgtctggatctgatcactgcttgagcctagaagatccggctgctaacaaagcccgaaaggaagctgagttggctgctgccaccgctgagcaataactatcataacccctaggagatccgaaccagataagtgaaatctagttccaaactattttgtcatttttaattttcgtattagcttacgacgctacacccagttcccatctattttgtcactcttccctaaataatccttaaaaactccatttccacccctcccagttcccaactattttgtccgcccaca

SEQ ID NO: 34 - DNA, 6940 bp, Artificial Sequence
  Synthetic construct
ttgttccagtttggaacaagagtccactattaaagaacgtggactccaacgtcaaagggcgaaaaaccgtctatcagggcgatggcccactacgtgaaccatcaccctaatcaagttttttggggtcgaggtgccgtaaagcactaaatcggaaccctaaagggagcccccgatttagagcttgacggggaaagccggcgaacgtggcgagaaaggaagggaagaaagcgaaaggagcgggcgctagggcgctggcaagtgtagcggtcacgctgcgcgtaaccaccacacccgccgcgcttaatgcgccgctacagggcgcgtcgcgccattcgccattcaggctgcgcaactgttgggaagggcgatcggtgcgggcctcttcgctattacgccagctggcgaaagggggatgtgctgcaaggcgattaagttgggtaacgccagggttttcccagtcacgacgttgtaaaacgacggccagtgcatagaccagccgcgtaacctggcaaaatcggttacggttgagtaataaatggatgccctgcgtaagcgggtgtgggcggacaataaagtcttaaactgaacaaaatagatctaaactatgacaataaagtcttaaactagacagaatagttgtaaactgaaatcagtccagttatgctgtgaaaaagcatactggacttttgttatggctaaagcaaactcttcattttctgaagtgcaaattgcccgtcgtattaaagaggggcgtggccaagggcatggtaaagactatattcgcggcgttgtgacaatttaccgaacaactccgcggccgggaagccgatctcggcttgaacgaattgttaggtggcggtacttgggtcgatatcaaagtgcatcacttcttcccgtatgcccaactttgtatagagagccactgcgggatcgtcaccgtaatctgcttgcacgtagatcacataagcaccaagcgcgttggcctcatgcttgaggagattgatgagcgcggtggcaatgccctgcctccggtgctcgccggagactgcgagatcatagatatagatctcactacgcggctgctcaaacttgggcagaacgtaagccgcgagagcgccaacaaccgcttcttggtcgaaggcagcaagcgcgatgaatgtcttactacggagcaagttcccgaggtaatcggagtccggctgatgttgggagtaggtggctacgtctccgaactcacgaccgaaaagatcaagagcagcccgcatggatttgacttggtcagggccgagcctacatgtgcgaatgatgcccatacttgagccacctaactttgttttagggcgactgccctgctgcgtaacatcgttgctgctgcgtaacatcgttgctgctccataacatcaaacatcgacccacggcgtaacgcgcttgctgcttggatgcccgaggcatagactgtacaaaaaaacagtcataacaagccatgaaaaccgccactgcgccgttaccaccgctgcgttcggtcaaggttctggaccagttgcgtgagcgcatacgctacttgcattacagtttacgaaccgaacaggcttatgtcaactgggttcgtgccttcatccgtttccacggtgtgcgtcacccggcaaccttgggcagcagcgaagtcgaggcatttctgtcctggctggcgaacgagcgcaaggtttcggtctccacgcatcgtcaggcattggcggccttgctgttcttctacggcaaggtgctgtgcacggatctgcccttgcttcaggagatcggtagacctcggccgtcgcggcgcttgccggtggtgctgaccccggatgaagtggttcgcatcctcggttttctggaaggcgagcatcgtttgttcgcccaggactctagctatagttctagtggttggctacagctttgtttgtactatcaacaggttgaactgctgatcaacagatcctctacgcggccgcggtaccataacttcgtatagcatacattatacgaagttatctggtttaaacgtacccgtagtggctatggcagggcttgccgccccgacgttggctgcgagccctgggccttcacccgaacttgggggttggggtggggaaaaggaagaaacgcgggcgtattggtcccaatggggtctcggtggggtatcgacagagtgccagccctgggaccgaaccccgcgtttatgaacaaacgacccaacacccgtgcgttttattctgtctttttattgccgtcatagcgcgggttccttccggtattgtctccttccgtgtttcagttagcctcccccatctcccggtaccgcatgctatgcatcagctgctagcaccatggctcgagatcccgggtgatcaagtcttcgtcgagtgattgtaaataaaatgtaatttacagtatagtattttaattaatatacaaatgatttgataataattcttatttaactataatatattgtgttgggttgaattaaaggtccgtatactagtatcgattcgcgacctactccggaatattaatagatcatggagataattaaaatgataaccatctcgcaaataaataagtattttactgttttcgtaacagttttgtaataaaaaaacctataaatattccggattattcataccgtcccaccatcgggcgcggatccgccaccatgggtgctcgtgcttcagtgctgtccggtggcgagctggacaagtgggagaagatccgtctgcgtcccggtggcaagaagcagtacaagctgaagcacatcgtgtgggcttcccgcgagctggaacgtttcgctgtgaaccccggcctgctggaaacctccgagggttgccgtcagatcctgggccagctgcagccctccctgcagaccggttccgaggaactgcgttccctgtacaacactatcgctgtgctgtactgcgtgcaccagcgtatcgacgtgaaggacaccaaggaagctctggacaagatcgaggaagaacagaacaagtccaagaagaaggcccagcaggctgctgctgacaccggcaacaactcccaggtgtcccagaactaccccatcgtgcagaacctgcagggccagatggtgcaccaggctatctccccccgtaccctgaacgcttgggtcaaggtggtggaagagaaggctttcagccccgaagtgatccccatgttctccgctctgtccgagggtgctaccccccaggacctgaacaccatgctgaacaccgtgggtggtcaccaggctgctatgcagatgctgaaggaaaccatcaacgaagaggctgctgagtgggaccgtctgcaccccgtgcacgctggtcctatcgctcccggacagatgcgcgagccccgtggttccgacatcgctggaaccacctccaccctgcaagagcagatcggctggatgacccacaacccccccatccccgtgggcgagatctacaagcgttggatcatcctgggcctgaacaagatcgtgcgtatgtactcccccacctccatcctggacatccgtcagggtcccaaggaacccttccgtgactacgtggaccgtttctacaagaccctgcgtgccgagcaggcttcccaagaggtcaagaactggatgaccgagactctgctggtgcagaacgctaaccccgactgcaagaccatcctgaaggctctgggtcccggtgctaccctggaagagatgatgaccgcttgccagggtgtcggtggtcccggtcacaaggctcgtgtgctggctgaggctatgtcccaagtgaccaaccccgctaccatcatgatccagaagggcaacttccgtaaccagcgcaagaccgtgaagtgcttcaactgcggcaaggaaggccacatcgctaagaactgccgtgctccccgcaagaagggctgctggaagtgcggaaaggaaggacaccagatgaaggactgcaccgagcgtcaggctaacttcctgggcaagatctggccctcccacaagggtcgtcccggcaacttcctgcagtcccgtcccgagcccaccgctcccccagaggaatccttccgtttcggcgaggaaaccaccaccccatcccagaagcaagagcccatcgacaaggaactgtaccccctggcttccctgcgctccctgttcggttccgacccatcctcccagtaaggcgccaagcttgtcgagaagtactagaggatcataatcagccataccacatttgtagaggttttacttgctttaaaaaacctcccacacctccccctgaacctgaaacataaaatgaatgcaattgttgttgttaacttgtttattgcagcttataatggttacaaataaagcaatagcatcacaaatttcacaaataaagcatttttttcactgcattctagttgtggtttgtccaaactcatcaatgtatcttatcatgtctggatctgatcactgcttgagcctagaagatccggctgctaacaaagcccgaaaggaagctgggaatattaatagatcatggagataattaaaatgataaccatctcgcaaataaataagtattttactgttttcgtaacagttttgtaataaaaaaacctataaatattccggattattcataccgtcccaccatcgggcgcggatcccggtccgaagcgcgcggaattcaaaggcctacgtcgacgccaccatggaatcccgtggtcgtcgttgccccgagatgatctccgtgctgggtcccatctccggtcacgtcctgaaggctgtgttctcccgtggcgacacccccgtgctgccccacgaaactcgtctgctgcagaccggtatccacgtgcgtgtgtcccagccctccctgatcctggtgtcccagtacacccccgactccaccccttgccaccgcggagacaaccagctgcaggtccagcacacctacttcaccggttccgaggtcgagaacgtgtccgtgaacgtgcacaaccccaccggtcgttccatctgcccctcccaagagcccatgtccatctacgtgtacgctctgcccctgaagatgctgaacatcccctccatcaacgtgcaccactacccctccgctgctgagcgcaagcaccgtcacctccccgtggctgacgctgtgatccacgcttccggcaagcagatgtggcaggctcgtctgaccgtgtccggcctggcttggacccgtcagcagaaccagtggaaggaacccgacgtgtactacacctccgctttcgtgttccccaccaaggacgtggccctgcgtcacgtcgtgtgcgctcacgaactcgtgtgctccatggaaaacacccgtgctaccaagatgcaagtgatcggcgaccagtacgtgaaggtgtacctggaatccttctgcgaggacgtgccctccggcaagctgttcatgcacgtgaccctgggttccgacgtggaagaggacctgaccatgacccgtaacccccagcccttcatgcgtccccacgagcgtaacggtttcaccgtgctgtgccccaagaacatgatcatcaagcccggcaagatctcccacatcatgctggacgtggccttcacctcccacgagcacttcggcctgctgtgccctaagtccatccccggcctgtccatctccggcaacctgctgatgaacggccagcagatcttcctggaagtgcaggctatccgtgaaaccgtcgagctgcgtcagtacgaccctgtggctgctctgttcttcttcgacatcgacctgctgctgcagcgtggtccccagtactccgagcaccccaccttcaccagccagtaccgtatccagggcaagctggaataccgtcacacctgggaccgtcacgacgagggtgctgctcagggcgacgacgacgtgtggacctccggttccgactccgacgaggaactggtcaccaccgagcgcaagaccccccgtgtgaccggtggtggtgctatggctggtgcttccacctccgctggtcgcaagcgcaagtccgcttcctccgctaccgcttgcaccgctggtgtcatgacccgtggtcgcctgaaggctgagtccaccgtggctcccgaagaggacactgacgaggactccgacaacgagatccacaaccccgctgtgttcacctggcccccctggcaggctggtatcctggctcgtaacctggtgcccatggtggctaccgtgcagggccagaacctgaagtaccaagagttcttctgggacgccaacgacatctaccgtatcttcgctgagctggaaggcgtgtggcagcccgctgctcagcccaagcgtcgtcgtcaccgtcaggacgctctgcctggtccctgtatcgcttccacccccaagaagcaccgcggctaaaagcttgtcgagaagtactagaggatcataatcagccataccacatttgtagaggttttacttgctttaaaaaacctcccacacctccccctgaacctgaaacataaaatgaatgcaattgttgttgttaacttgtttattgcagcttataatggttacaaataaagcaatagcatcacaaatttcacaaataaagcatttttttcactgcattctagttgtggtttgtccaaactcatcaatgtatcttatcatgtctggatctgatcactgcttgagcctagaagatccggctgctaacaaagcccgaaaggaagctgagttggctgctgccaccgctgagcaataactatcataacccctaggagatccgaaccagataagtgaaatctagttccaaactattttgtcatttttaattttcgtattagcttacgacgctacacccagttcccatctattttgtcactcttccctaaataatccttaaaaactccatttccacccctcccagttcccaactattttgtccgcccaca

SEQ ID NO: 35 - DNA, 17177 bp, Artificial Sequence
  Synthetic construct
ttgttccagtttggaacaagagtccactattaaagaacgtggactccaacgtcaaagggcgaaaaaccgtctatcagggcgatggcccactacgtgaaccatcaccctaatcaagttttttggggtcgaggtgccgtaaagcactaaatcggaaccctaaagggagcccccgatttagagcttgacggggaaagccggcgaacgtggcgagaaaggaagggaagaaagcgaaaggagcgggcgctagggcgctggcaagtgtagcggtcacgctgcgcgtaaccaccacacccgccgcgcttaatgcgccgctacagggcgcgtcgcgccattcgccattcaggctgcgcaactgttgggaagggcgatcggtgcgggcctcttcgctattacgccagctggcgaaagggggatgtgctgcaaggcgattaagttgggtaacgccagggttttcccagtcacgacgttgtaaaacgacggccagtgcatagaccagccgcgtaacctggcaaaatcggttacggttgagtaataaatggatgccctgcgtaagcgggtgtgggcggacaataaagtcttaaactgaacaaaatagatctaaactatgacaataaagtcttaaactagacagaatagttgtaaactgaaatcagtccagttatgctgtgaaaaagcatactggacttttgttatggctaaagcaaactcttcattttctgaagtgcaaattgcccgtcgtattaaagaggggcgtggccaagggcatggtaaagactatattcgcggcgttgtgacaatttaccgaacaactccgcggccgggaagccgatctcggcttgaacgaattgttaggtggcggtacttgggtcgatatcaaagtgcatcacttcttcccgtatgcccaactttgtatagagagccactgcgggatcgtcaccgtaatctgcttgcacgtagatcacataagcaccaagcgcgttggcctcatgcttgaggagattgatgagcgcggtggcaatgccctgcctccggtgctcgccggagactgcgagatcatagatatagatctcactacgcggctgctcaaacttgggcagaacgtaagccgcgagagcgccaacaaccgcttcttggtcgaaggcagcaagcgcgatgaatgtcttactacggagcaagttcccgaggtaatcggagtccggctgatgttgggagtaggtggctacgtctccgaactcacgaccgaaaagatcaagagcagcccgcatggatttgacttggtcagggccgagcctacatgtgcgaatgatgcccatacttgagccacctaactttgttttagggcgactgccctgctgcgtaacatcgttgctgctgcgtaacatcgttgctgctccataacatcaaacatcgacccacggcgtaacgcgcttgctgcttggatgcccgaggcatagactgtacaaaaaaacagtcataacaagccatgaaaaccgccactgcgccgttaccaccgctgcgttcggtcaaggttctggaccagttgcgtgagcgcatacgctacttgcattacagtttacgaaccgaacaggcttatgtcaactgggttcgtgccttcatccgtttccacggtgtgcgtcacccggcaaccttgggcagcagcgaagtcgaggcatttctgtcctggctggcgaacgagcgcaaggtttcggtctccacgcatcgtcaggcattggcggccttgctgttcttctacggcaaggtgctgtgcacggatctgcccttgcttcaggagatcggtagacctcggccgtcgcggcgcttgccggtggtgctgaccccggatgaagtggttcgcatcctcggttttctggaaggcgagcatcgtttgttcgcccaggactctagctatagttctagtggttggctacagctttgtttgtactatcaacaggttgaactgctgatcaacagatcctctacgcggccgcggtaccataacttcgtatagcatacattatacgaagttatctggtttaaacgtacccgtagtggctatggcagggcttgccgccccgacgttggctgcgagccctgggccttcacccgaacttgggggttggggtggggaaaaggaagaaacgcgggcgtattggtcccaatggggtctcggtggggtatcgacagagtgccagccctgggaccgaaccccgcgtttatgaacaaacgacccaacacccgtgcgttttattctgtctttttattgccgtcatagcgcgggttccttccggtattgtctccttccgtgtttcagttagcctcccccatctcccggtaccgcatgctatgcatcagctgctagcaccatggctcgagatcccgggtgatcaagtcttcgtcgagtgattgtaaataaaatgtaatttacagtatagtattttaattaatatacaaatgatttgataataattcttatttaactataatatattgtgttgggttgaattaaaggtccgtatactagtatcgattcgcgacctactccggaatattaatagatcatggagataattaaaatgataaccatctcgcaaataaataagtattttactgttttcgtaacagttttgtaataaaaaaacctataaatattccggattattcataccgtcccaccatcgggcgcggatccgccaccatggaaaactggtccgctctggaactgctgcccaaggtcggaatccctaccgacttcctgacccacgtcaagacctccgctggcgaggaaatgttcgaggctctgaggatctactacggcgacgaccccgagcgttacaacatccacttcgaggctatcttcggcaccttctgcaaccgtctggaatgggtgtacttcctgacttccggcctggctgctgctgctcacgctatcaagttccacgacctgaacaagctgaccaccggcaagatgctgttccacgtgcaagtgccccgtgtggcttccggtgctggcctgcctacctcccgtcagaccaccatcatggtcaccaagtactccgagaagtcccccatcaccatccctttcgagctgtccgctgcttgcctgacttacctgcgtgaaaccttcgagggcaccatcctggacaagatcctgaacgtcgaggctatgcacaccgtgctgcgtgctctgaagaacaccgctgacgctatggaacgtggcctgatccacagcttcctccagaccctgctgaggaaggctcccccctacttcgtggtgcagaccctggtcgagaacgctaccctggctcgtcaggctctgaaccgtatccagcgctccaacatcctgcagtccttcaaggctaagatgctggctaccctgttcctgctgaaccgtacccgtgaccgtgactacgtgctgaagttcctgacccgtctggctgaggctgctaccgactccatcctcgacaaccctactacctacaccacctcctccggtgctaagatctccggtgtcatggtgtccaccgctaacgtgatgcagatcatcatgtccctgctgtcctcccacatcactaaggaaaccgtgtccgctcccgctacctacggcaacttcgtgctgtcccccgagaacgctgtgaccgctatctcctaccactctatcctggctgacttcaactcctacaaggctcacctgacctccggccagccccacctccccaacgactccctgagccaggctggtgctcactccctgacccccctgtccatggacgtgatccgtctgggcgaaaagaccgtgatcatggaaaacctgcgtcgcgtgtacaagaacaccgacaccaaggaccccctggaacgtaacgtggacctgaccttcttcttccccgtgggcctgtacctgcccgaggaccgtggttacaccaccgtcgagtccaaggtcaagctgaacgacaccgtgcgtaacgctctgcccaccaccgcttacctgctgaacagggaccgtgctgtgcaaaagatcgacttcgtggacgctctcaagaccctgtgccaccccgtgctgcacgagcctgctccatgcctgcaggctttcaccgagcgtggtcccccatccgagcccgctatgcagcgtctgctggaatgccgtttccagcaagagcccatgggtggtgctgctcgtcgtatcccccacttctaccgtgtgcgccgcgaggtgccccgtaccgtgaacgagatgaagcaggacttcgtggtcaccgacttctacaaggttggaaacatcaccctgtacaccgagctgcaccctttcttcgacttcacccactgccaagagaactccgagactgtggctctgtgcaccccccgtatcgtgatcggcaacctgcccgacggcctggctcccggtcccttccacgagctgaggacctgggagatcatggaacacatgcgcctgcgtcccccacccgactacgaggaaaccctgcgtctgttcaagaccaccgtgacctcccccaactaccccgagctgtgctacctggtggacgtgctggtgcacggcaacgctgacgctttcctgctgatccgcgctttcatcgctcgttgcatcgtgaacatgttccacacccgtcagctgctggtgttcgctcactcctacgctctggtcaccctgatcgctgagcacctggctgacggtgctctgcccccccagctcctgttccactaccgtaacctggtggctgtgctgcgcctggtcacccgtatctccgctctgcccggcctgaacaacggccagctggctgaggaacccctgtccgcttacgtgaacgctctgcacgaccacaggctgtggccccccttcgtgacccacctccctcgtaacatggaaggtgtccaggtggtggctgatcgtcagcccctgaaccccgctaacatcgaggctcgtcaccacggtgtctccgacgtgccccgtctgggtgctatggacgctgacgagcccctgttcgtggacgactaccgtgctaccgacgacgagtggaccctgcaaaaggtgttctacctgtgcctgatccccgctatgaccaacaaccgtgcttgcggcctgggcctgaacctcaagactctgctggtggacctgttctaccgtcccgccttcctgctcatgcccgctgctaccgctgtgtccacctccggcaccacctccaaggaatccacctctggtgtcacccccgaggactccgtggctgctcagcgtcaggctgtgggcgagatgctgaccgagctggtcgaggacgtggccaccgacgctcacacccctctgctgcaggcttgccgcgagctgttcctggctgtgcagttcgtgggcgagcacgtgaaggtgctggaagtgcgtgctcccctggaccacgctcagaggcagggactgcccgacttcatctcccgtcagcatgtgctgtacaacggttgctgcgtcgtgaccgctcctaagaccctgatcgagtactccctgcccgtgcccttccaccgtttctactccaaccccaccatctgcgctgctctgtccgacgacatcaagcgttacgtgaccgagttcccccactaccatagacacgatggtggtttccccctgcccaccgctttcgctcacgagtaccacaactggctgcgtagccccttctcccgttactccgctacctgccccaacgtgctgcactccgtgatgaccctggctgctatgctgtacaagatctcccccgtgtccctggtgctgcagaccaaggctcacatccaccccggtttcgctctgaccgctgtgcgtaccgacaccttcgaggtggacatgctgctgtactccggcaagtcctgcacctccgtcatcatcaacaaccccatcgtgaccaaggaagagagggacatctccaccacctaccacgtgacccagaacatcaacaccgtggacatgggcctgggttacacctccaacacttgcgtggcctacgtgaaccgcgtccgcaccgacatgggtgtccgtgtgcaggacctgttccgtgtgttccccatgaacgtgtaccgccacgatgaggtggaccgttggatcaggcacgctgctggcgtcgagcgtccccagctgctggacaccgagactatctccatgctgaccttcggttccatgtccgagcgcaacgctgctgctaccgtgcacggccagaaggctgtctgcgagctgatcctgacccctgtgactatggacgtgaactacttcaagatcaccaacaaccctcgtggtcgtgcttcctgcatgctgggcgtggacccctacgacaccgaggctgccaccaaggctatctacgaccaccgcgaggctgacgctcagaccttcgctgctacccacaacccatgggcttcccaggctggttgcctgtccgacgtcctgtacaacacccgtcaccgcgagcgtctgggctacaactccaagttctactccccctgcgctcagtacttcaacaccgaggaaatcatcgctgccaacaagaccctcttcaagaccatcgacgagtacctgctgcgcgctaaggactgcatccgtggcgacaccgacactcagtacgtgtgcgtcgagggaaccgagcagctgatcgagaacccttgccgtctgacccaagaggctctgcccatcctgtccaccaccaccctggctctgatggaaactaagctgaagggtggcgctggtgctttcgctacctccgagactcacttcggcaactacgtcgtgggagagatcatccccctgcagcagtccatgctgttcaacagctaagagctcaagcttgtcgagaagtactagaggatcataatcagccataccacatttgtagaggttttacttgctttaaaaaacctcccacacctccccctgaacctgaaacataaaatgaatgcaattgttgttgttaacttgtttattgcagcttataatggttacaaataaagcaatagcatcacaaatttcacaaataaagcatttttttcactgcattctagttgtggtttgtccaaactcatcaatgtatcttatcatgtctggatctgatcactgcttgagcctagaagatccggctgctaacaaagcccgaaaggaagctgagttggctgctgcccaccgctgagcaataactatcataacccccggaatattaatagatcatggagataattaaaatgataaccatctcgcaaataaataagtattttactgttttcgtaacagttttgtaataaaaaaacctataaatattccggattattcataccgtcccaccatcgggcgcggatccgccaccatggctgctatggaagctaacatcttctgcaccttcgaccacaagctgtctatcgctgacgtgggcaagctgaccaagctggtggctgctgtggtgcccatcccccagcgtctgcacctgatcaagcactaccagctgggcctgcaccagttcgtggaccacacccgtggttacgtgcgtctgcgtggcctgctgcgtaacatgaccctgaccctgatgcgtcgtgtcgagggcaaccagatcctgctgcacgtgcccacccacggcctgctgtacaccgtgctgaacaccggtcccgtgacctgggagaagggcgacgctctgtgcgtgctgccccccctgttccacggtcccctggctcgtgaaaacctgttgaccctgggccagtgggagctggtgctgccctggatcgtgcccatgcccctggctctggaaatcaaccagcgcctgctgatcatgggcctgttctccctggaccgttcctacgaagaagtgaaggctgctgtccagcagctgcagaccatcaccttccgtgacgctaccttcaccatccccgaccccgtgatcgaccagcacctcctgatcgacatgaagaccgcttgcctgtccatgtccatggtggctaacctggcttccgagctgaccatgacctacgtccgcaagctggctttggaggactcttccatgctgctggtcaagtgccaagagctgctgatgcgtctggaccgcgagcgttccgtgggcgagcctcgtactcccgctcgtcctcagcacgtgtcccccgacgacgagatcgctcgtctgtccgctctgttcgtgatgctgcgtcagctggacgacctgatccgcgagcaggtcgtgttcaccgtgtgcgacgtgagcccagacaacaagtccgctacctgcatcttcaagggctaaggcgcgccaagcttgtcgagaagtactagaggatcataatcagccataccacatttgtagaggttttacttgctttaaaaaacctcccacacctccccctgaacctgaaacataaaatgaatgcaattgttgttgttaacttgtttattgcagcttataatggttacaaataaagcaatagcatcacaaatttcacaaataaagcatttttttcactgcattctagttgtggtttgtccaaactcatcaatgtatcttatcatgtctggatctgatcactgcttgagcctagaagatccggctgctaacaaagcccgaaaggaagctgagttggctgctgccaccgctgagcaataactatcataacccccggaatattaatagatcatggagataattaaaatgataaccatctcgcaaataaataagtattttactgttttcgtaacagttttgtaataaaaaaacctataaatattccggattattcataccgtcccaccatcgggcgcggatcccggtccgaagcgcgcggaattcaaaggcctgccaccatggaaatgaacaaggtgctgcatcaggatctggtgcaggctacccgtcgtatcctgaagctgggcccctccgagctgcgtgtgaccgacgctggcctgatctgcaagaaccccaactactccgtgtgcgacgctatgctcaagaccgacaccgtgtactgcgtcgagtacctgctgtcctactgggagtcccgtaccgaccacgtgccctgcttcatcttcaagaacaccggttgcgctgtgtccctgtgctgcttcgtgcgtgctcccgtgaagctggtgtcccctgctcgtcacgtgggcgagttcaacgtgctgaaggtcaacgagtccctgatcgtgaccctgaaggacatcgaggaaatcaagccctccgcttacggtgtcctgactaagtgcgtcgtccgcaagtccaactccgcttccgtgttcaacatcgagctgatcgctttcggtcccgagaacgagggcgagtacgagaacctgctgcgcgagctgtacgctaagaaggctgcttccacctccctggctgtgcgtaaccacgtgaccgtgtcctcccactccggttccggtccctccctgtggcgtgctcgtatgtccgctgctctgacccgtaccgctggcaagcgctcctccaggactgctagccctccaccaccacctcctcgtcaccctagctgctctcccactatggtggctgctggtggagctgctgctggtcctagacctccccctcctcctatggctgctggatcctggcgtctgtgccgttgcgaggcttgcatgggccgttgcggttgcgcttccgagggcgacgctgacgaggaagaggaagagttgctggctctggctggcgagggcaaggctgctgctgccgctgccggtcaagacgtcggtggttccgctcgtcgtcccctcgaggaacacgtgtcccgtcgtcgtggtgtctccacccaccaccgtcaccccccttccccaccttgcgctccctccctggaacgtaccggttaccgttgggctccttcctcctggtggcgcgctcgttctggtccttcccgtccccagtccggtccctggctgcctgctcgtttcgctaccctgggtcccctggtcctggctctgctgttggtgctggccctgctgtggcgtggtcacggtcaatcccccagccccacccgttccgctcaccgtgactaaaagcttgtcgagaagtactagaggatcataatcagccataccacatttgtagaggttttacttgctttaaaaaacctcccacacctccccctgaacctgaaacataaaatgaatgcaattgttgttgttaacttgtttattgcagcttataatggttacaaataaagcaatagcatcacaaatttcacaaataaagcatttttttcactgcattctagttgtggtttgtccaaactcatcaatgtatcttatcatgtctggatctgatcactgcttgagcctagaagatccggctgctaacaaagcccgaaaggaagctgagttggctgctgtggctagctttgtttaactttaagaaggagatacatctagaaatattaatagatcatggagataattaaaatgataaccatctcgcaaataaataagtattttactgttttcgtaacagttttgtaataaaaaaacctataaatattccggattattcataccgtcccaccatcgggcgcggatcccggtccgaagcgcgcggaattcaaaggcctacgtcgacgccaccatgtccaacaccgctcccggtcccaccgtggctaacaagcgtgacgagaagcaccgtcacgtggtcaacgtggtgctcgagctgcccaccgagatctccgaggctacccaccccgtgctggctaccatgctgtccaagtacacccgtatgtcctccctgttcaacgacaagtgcgctttcaagctggacctgctgcgtatggtggctgtgtcccgtacccgtcgctaaaagcttgtcgagaagtactagaggatcataatcagccataccacatttgtagaggttttacttgctttaaaaaacctcccacacctccccctgaacctgaaacataaaatgaatgcaattgttgttgttaacttgtttattgcagcttataatggttacaaataaagcaatagcatcacaaatttcacaaataaagcatttttttcactgcattctagttgtggtttgtccaaactcatcaatgtatcttatcatgtctggatctgatcactgcttgagcctagaagatccggctgctaacaaagcccgaaaggaagctgagttggctgctgggtgcctaatgagtgagctaactcacattaattgcccggaatattaatagatcatggagataattaaaatgataaccatctcgcaaataaataagtattttactgttttcgtaacagttttgtaataaaaaaacctataaatattccggattattcataccgtcccaccatcgggcgcggatcccggtccgaagcgcgcggaattcgccaccatggacgctcgtgctgtggctaagcgtccccgtgaccccgctgacgaggacaacgagctggtcaccgctctgaaggctaagcgtgaagtgaacaccatctccgtgcgttacctgtaccacgctgaccaccaggctctgaccgctcgtttcttcgtgcccgagggcctggtcgagttcgaggctcagcccggtgctctgctgatccgtatggaaaccggttgcgactccccccgtcacctgtacatctccctgtacctgctgggtatccgtgcttccaacgtgtccgcttccacccgttgcctgctcgagtccgtgtacaccgcttccgctgctcgtgctgctctgcagtggctggacctgggtccccacctcctgcaccgtcgtctggaaaccctgggttgcgtcaagaccgtgtccctgggtatcacctccctgctgacctgcgtgatgcgcggctacctgtacaacaccctcaagaccgaggtgttcgctctgatgatccccaaggacatgtacctgacctgggaggaaacccgcggtcgtctgcagtacgtgtacctgatcatcgtgtacgactacgacggtcccgagactcgtcccggtatctacgtgctgacctcctctatcgctcactggcagaccctggtggacgtggcccgtggaaagttcgctcgtgaacgctgctccttcgtgaaccgtcgtatcacccgtccccgtcagatccccctgtgcaccggtgtcatccaaaagctgggctggtgcctggctgacgacatccacacctcattcctcgtgcacaaggaactgaagctgtccgtcgtgcgtctggacaacttctccgtcgagctgggcgacttccgcgagttcgtgcagctgttgaattttgaccttcttaagcttgcgggagacgtcgagtccaaccctgggcccatggaatcccgtggtcgtcgttgccccgagatgatctccgtgctgggtcccatctccggtcacgtcctgaaggctgtgttctcccgtggcgacacccccgtgctgccccacgaaactcgtctgctgcagaccggtatccacgtgcgtgtgtcccagccctccctgatcctggtgtcccagtacacccccgactccaccccttgccaccgcggagacaaccagctgcaggtccagcacacctacttcaccggttccgaggtcgagaacgtgtccgtgaacgtgcacaaccccaccggtcgttccatctgcccctcccaagagcccatgtccatctacgtgtacgctctgcccctgaagatgctgaacatcccctccatcaacgtgcaccactacccctccgctgctgagcgcaagcaccgtcacctccccgtggctgacgctgtgatccacgcttccggcaagcagatgtggcaggctcgtctgaccgtgtccggcctggcttggacccgtcagcagaaccagtggaaggaacccgacgtgtactacacctccgctttcgtgttccccaccaaggacgtggccctgcgtcacgtcgtgtgcgctcacgaactcgtgtgctccatggaaaacacccgtgctaccaagatgcaagtgatcggcgaccagtacgtgaaggtgtacctggaatccttctgcgaggacgtgccctccggcaagctgttcatgcacgtgaccctgggttccgacgtggaagaggacctgaccatgacccgtaacccccagcccttcatgcgtccccacgagcgtaacggtttcaccgtgctgtgccccaagaacatgatcatcaagcccggcaagatctcccacatcatgctggacgtggccttcacctcccacgagcacttcggcctgctgtgccctaagtccatccccggcctgtccatctccggcaacctgctgatgaacggccagcagatcttcctggaagtgcaggctatccgtgaaaccgtcgagctgcgtcagtacgaccctgtggctgctctgttcttcttcgacatcgacctgctgctgcagcgtggtccccagtactccgagcaccccaccttcaccagccagtaccgtatccagggcaagctggaataccgtcacacctgggaccgtcacgacgagggtgctgctcagggcgacgacgacgtgtggacctccggttccgactccgacgaggaactggtcaccaccgagcgcaagaccccccgtgtgaccggtggtggtgctatggctggtgcttccacctccgctggtcgcaagcgcaagtccgcttcctccgctaccgcttgcaccgctggtgtcatgacccgtggtcgcctgaaggctgagtccaccgtggctcccgaagaggacactgacgaggactccgacaacgagatccacaaccccgctgtgttcacctggcccccctggcaggctggtatcctggctcgtaacctggtgcccatggtggctaccgtgcagggccagaacctgaagtaccaagagttcttctgggacgccaacgacatctaccgtatcttcgctgagctggaaggcgtgtggcagcccgctgctcagcccaagcgtcgtcgtcaccgtcaggacgctctgcctggtccctgtatcgcttccacccccaagaagcaccgcggctaaaagcttgtcgagaagtactagaggatcataatcagccataccacatttgtagaggttttacttgctttaaaaaacctcccacacctccccctgaacctgaaacataaaatgaatgcaattgttgttgttaacttgtttattgcagcttataatggttacaaataaagcaatagcatcacaaatttcacaaataaagcatttttttcactgcattctagttgtggtttgtccaaactcatcaatgtatcttatcatgtctggatctgatcactgcttgagcctagaagatccggctgctaacaaagcccgaaaggaagctgagttggctgctgtggctagctttgtttaactttaagaaggagatacatctagacctgcaggccggaatattaatagatcatggagataattaaaatgataaccatctcgcaaataaataagtattttactgttttcgtaacagttttgtaataaaaaaacctataaatattccggattattcataccgtcccaccatcgggcgcggatcccggtccgaagcgcgcggaattcgccaccatgaccatggacgagcagcagccccaggctgtgacccccgtgtacgtgggcggtttcctggctcgttacgaccagtcccccgacgaggctgagctgctgctgccacgtgacgtggtcgaacactggctgcacgctcagggccagggacagccttccctgtccgtggctctgcccctgaacatcaaccacgacgacaccgctgtcgtgggtcacgtggccgctatgcagtccgtgcgtgacggcctgttctgcctgggttgcgtgacctccccccgtttcctggaaatcgtgcgtcgtgcttccgagaagtccgagctggtgtcccgtggtcccgtgtccccactgcagcccgacaaggtggtcgagttcctgtccggttcctacgctggcctgtccctgtcatcccgtcgttgcgacgacgtcgaggctgctacctccctgagcggctccgagactacccccttcaagcacgtggccctgtgctccgtgggtcgtaggcgtggaaccctggctgtgtacggtcgtgaccccgagtgggtcacccagcgtttccccgacctgaccgctgctgaccgtgacggactgcgtgctcagtggcagcgttgcggttccaccgctgtggacgcttccggcgaccccttccgttccgactcctacggcctgctgggcaactccgtggacgctctgtacatccgcgagcgtctgcccaagctgcgttacgacaagcagctcgtgggtgtcaccgagcgcgagtcctacgtgaaggcttccgtgtcccccgaggctgcttgcgacatcaaggctgcttccgctgagcgttctggcgacagccgctcccaggctgctactcctgctgctggtgctcgtgtgccctccagctccccatccccacctgtcgagcctccctcccccgtgcaacctcctgctctgcctgcttccccctccgtgctgcctgctgagtccagcccctccctgtcaccctctgagcctgctgaggctgcctccatgtcccaccctctgagcgctgctgtgactgctgctaccgctccccctggtgctactgtggctggtgcttcccccgctgtgccttccctggcttggcctcacgacggtgtctacctgcccaaggacgctttcttctccctgctgggcgcttcccgttccgctgctcccgtgatgtaccccggtgctgtggctgctccccccagcgcttcacctgctcctctgcccctgccctcctaccccgcttcctacggtgctcccgtcgtgggttacgaccagctggctgctcgtcacttcgctgactacgtggacccccactaccccggctggggtcgtcgttacgagcccgctccttccctgcacccatcctaccctgtgccccctcctccatcacccgcttactaccgtcgtcgtgactcccccggtggcatggacgagcctccatctggatgggagcgttacgacggttcccaccgtggccagtcccaaaagcagcaccgtcacggtggttccggtggtcacaacaagcgtcgcaaggaagccgctgctgcatcctccagctccgacgaggacctgagcttccccggcgaggctgaacacggtcgtgctcgcaagcgtctgaagtcccacgtgaactccgacggaggtagcggaggccacgctggttccaaccagcagcagcaacagcgctacgacgagctgcgtgacgctatccacgagctgaagcgtgacctgttcgctgctcgccagtcctccaccctgctgtctgctgctctgccagctgccgcttcttcctcccctaccaccaccaccgtgtgcacccctactggcgagctgacctctggtggtggcgagactcccaccgctctgctgtccggtggtgctaaggtggccgagcgtgctcaggctggtgtcgtgaacgcttcctgccgtctggctaccgcttccggttccgaggctgccaccgctggtccctctaccgctggttcctcatcctgcccagcttccgtggtgctggctgccgctgctgctcaagccgccgctgcttcacagtcccccccaaaggatatggtggacctgaaccgtcgtatcttcgtggctgctctgaacaagctcgagtaataaaagcttgtcgagaagtactagaggatcataatcagccataccacatttgtagaggttttacttgctttaaaaaacctcccacacctccccctgaacctgaaacataaaatgaatgcaattgttgttgttaacttgtttattgcagcttataatggttacaaataaagcaatagcatcacaaatttcacaaataaagcatttttttcactgcattctagttgtggtttgtccaaactcatcaatgtatcttatcatgtctggatctgatcactgcttgagcctagaagatccggctgctaacaaagcccgaaaggaagctgagttggctgctgccaccgctgagcaataactatcataacccctaggagatccgaaccagataagtgaaatctagttccaaactattttgtcatttttaattttcgtattagcttacgacgctacacccagttcccatctattttgtcactcttccctaaataatccttaaaaactccatttccacccctcccagttcccaactattttgtccgcccaca

SEQ ID NO: 36 - DNA, 21120 bp, Artificial Sequence
  Synthetic construct
ttgttccagtttggaacaagagtccactattaaagaacgtggactccaacgtcaaagggcgaaaaaccgtctatcagggcgatggcccactacgtgaaccatcaccctaatcaagttttttggggtcgaggtgccgtaaagcactaaatcggaaccctaaagggagcccccgatttagagcttgacggggaaagccggcgaacgtggcgagaaaggaagggaagaaagcgaaaggagcgggcgctagggcgctggcaagtgtagcggtcacgctgcgcgtaaccaccacacccgccgcgcttaatgcgccgctacagggcgcgtccattcgccattcaggctgcgcaactgttgggaagggcgatcggtgcgggcctcttcgctattacgccagctggcgaaagggggatgtgctgcaaggcgattaagttgggtaacgccagggttttcccagtcacgacgttgtaaaacgacggccagtgcatagaccagccgcgtaacctggcaaaatcggttacggttgagtaataaatggatgccctgcgtaagcgggtgtgggcggacaataaagtcttaaactgaacaaaatagatctaaactatgacaataaagtcttaaactagacagaatagttgtaaactgaaatcagtccagttatgctgtgaaaaagcatactggacttttgttatggctaaagcaaactcttcattttctgaagtgcaaattgcccgtcgtattaaagaggggcgtggccaagggcatggtaaagactatattcgcggcgttgtgacaatttaccgaacaactccgcggccgggaagccgatctcggcttgaacgaattgttaggtggcggtacttgggtcgatatcaaagtgcatcacttcttcccgtatgcccaactttgtatagagagccactgcgggatcgtcaccgtaatctgcttgcacgtagatcacataagcaccaagcgcgttggcctcatgcttgaggagattgatgagcgcggtggcaatgccctgcctccggtgctcgccggagactgcgagatcatagatatagatctcactacgcggctgctcaaacttgggcagaacgtaagccgcgagagcgccaacaaccgcttcttggtcgaaggcagcaagcgcgatgaatgtcttactacggagcaagttcccgaggtaatcggagtccggctgatgttgggagtaggtggctacgtctccgaactcacgaccgaaaagatcaagagcagcccgcatggatttgacttggtcagggccgagcctacatgtgcgaatgatgcccatacttgagccacctaactttgttttagggcgactgccctgctgcgtaacatcgttgctgctgcgtaacatcgttgctgctccataacatcaaacatcgacccacggcgtaacgcgcttgctgcttggatgcccgaggcatagactgtacaaaaaaacagtcataacaagccatgaaaaccgccactgcgccgttaccaccgctgcgttcggtcaaggttctggaccagttgcgtgagcgcatacgctacttgcattacagtttacgaaccgaacaggcttatgtcaactgggtttgtgccttcatccgtttccacggtgtgcgtcacccggcaaccttgggcagcagcgaagtcgaggcatttctgtcctggctggcgaacgagcgcaaggtttcggtctccacgcatcgtcaggcattggcggccttgctgttcttctacggcaaggtgctgtgcacggatctgcccttgcttcaggagatcggtagacctcggccgtcgcggcgcttgccggtggtgctgaccccggatgaagtggttcgcatcctcggttttctggaaggcgagcatcgtttgttcgcccaggactctagctatagttctagtggttggctacagctttgtttgtactatcaacaggttgaactgctgatcaacagatcctctacgcggccgcggtaccataacttcgtatagcatacattatacgaagttatctggtttaaacgtacccgtagtggctatggcagggcttgccgccccgacgttggctgcgagccctgggccttcacccgaacttgggggttggggtggggaaaaggaagaaacgcgggcgtattggtcccaatggggtctcggtggggtatcgacagagtgccagccctgggaccgaaccccgcgtttatgaacaaacgacccaacacccgtgcgttttattctgtctttttattgccgtcatagcgcgggttccttccggtattgtctccttccgtgtttcagttagcctcccccatctcccggtaccgcatgctatgcatcagctgctagcaccatggctcgagatcccgggtgatcaagtcttcgtcgagtgattgtaaataaaatgtaatttacagtatagtattttaattaatatacaaatgatttgataataattcttatttaactataatatattgtgttgggttgaattaaaggtccgtatactagtatcgattcgcgacctactccggaatattaatagatcatggagataattaaaatgataaccatctcgcaaataaataagtattttactgttttcgtaacagttttgtaataaaaaaacctataaatattccggattattcataccgtcccaccatcgggcgcggatccgccaccatggaaaactggtccgctctggaactgctgcccaaggtcggaatccctaccgacttcctgacccacgtcaagacctccgctggcgaggaaatgttcgaggctctgaggatctactacggcgacgaccccgagcgttacaacatccacttcgaggctatcttcggcaccttctgcaaccgtctggaatgggtgtacttcctgacttccggcctggctgctgctgctcacgctatcaagttccacgacctgaacaagctgaccaccggcaagatgctgttccacgtgcaagtgccccgtgtggcttccggtgctggcctgcctacctcccgtcagaccaccatcatggtcaccaagtactccgagaagtcccccatcaccatccctttcgagctgtccgctgcttgcctgacttacctgcgtgaaaccttcgagggcaccatcctggacaagatcctgaacgtcgaggctatgcacaccgtgctgcgtgctctgaagaacaccgctgacgctatggaacgtggcctgatccacagcttcctccagaccctgctgaggaaggctcccccctacttcgtggtgcagaccctggtcgagaacgctaccctggctcgtcaggctctgaaccgtatccagcgctccaacatcctgcagtccttcaaggctaagatgctggctaccctgttcctgctgaaccgtacccgtgaccgtgactacgtgctgaagttcctgacccgtctggctgaggctgctaccgactccatcctcgacaaccctactacctacaccacctcctccggtgctaagatctccggtgtcatggtgtccaccgctaacgtgatgcagatcatcatgtccctgctgtcctcccacatcactaaggaaaccgtgtccgctcccgctacctacggcaacttcgtgctgtcccccgagaacgctgtgaccgctatctcctaccactctatcctggctgacttcaactcctacaaggctcacctgacctccggccagccccacctccccaacgactccctgagccaggctggtgctcactccctgacccccctgtccatggacgtgatccgtctgggcgaaaagaccgtgatcatggaaaacctgcgtcgcgtgtacaagaacaccgacaccaaggaccccctggaacgtaacgtggacctgaccttcttcttccccgtgggcctgtacctgcccgaggaccgtggttacaccaccgtcgagtccaaggtcaagctgaacgacaccgtgcgtaacgctctgcccaccaccgcttacctgctgaacagggaccgtgctgtgcaaaagatcgacttcgtggacgctctcaagaccctgtgccaccccgtgctgcacgagcctgctccatgcctgcaggctttcaccgagcgtggtcccccatccgagcccgctatgcagcgtctgctggaatgccgtttccagcaagagcccatgggtggtgctgctcgtcgtatcccccacttctaccgtgtgcgccgcgaggtgccccgtaccgtgaacgagatgaagcaggacttcgtggtcaccgacttctacaaggttggaaacatcaccctgtacaccgagctgcaccctttcttcgacttcacccactgccaagagaactccgagactgtggctctgtgcaccccccgtatcgtgatcggcaacctgcccgacggcctggctcccggtcccttccacgagctgaggacctgggagatcatggaacacatgcgcctgcgtcccccacccgactacgaggaaaccctgcgtctgttcaagaccaccgtgacctcccccaactaccccgagctgtgctacctggtggacgtgctggtgcacggcaacgctgacgctttcctgctgatccgcgctttcatcgctcgttgcatcgtgaacatgttccacacccgtcagctgctggtgttcgctcactcctacgctctggtcaccctgatcgctgagcacctggctgacggtgctctgcccccccagctcctgttccactaccgtaacctggtggctgtgctgcgcctggtcacccgtatctccgctctgcccggcctgaacaacggccagctggctgaggaacccctgtccgcttacgtgaacgctctgcacgaccacaggctgtggccccccttcgtgacccacctccctcgtaacatggaaggtgtccaggtggtggctgatcgtcagcccctgaaccccgctaacatcgaggctcgtcaccacggtgtctccgacgtgccccgtctgggtgctatggacgctgacgagcccctgttcgtggacgactaccgtgctaccgacgacgagtggaccctgcaaaaggtgttctacctgtgcctgatccccgctatgaccaacaaccgtgcttgcggcctgggcctgaacctcaagactctgctggtggacctgttctaccgtcccgccttcctgctcatgcccgctgctaccgctgtgtccacctccggcaccacctccaaggaatccacctctggtgtcacccccgaggactccgtggctgctcagcgtcaggctgtgggcgagatgctgaccgagctggtcgaggacgtggccaccgacgctcacacccctctgctgcaggcttgccgcgagctgttcctggctgtgcagttcgtgggcgagcacgtgaaggtgctggaagtgcgtgctcccctggaccacgctcagaggcagggactgcccgacttcatctcccgtcagcatgtgctgtacaacggttgctgcgtcgtgaccgctcctaagaccctgatcgagtactccctgcccgtgcccttccaccgtttctactccaaccccaccatctgcgctgctctgtccgacgacatcaagcgttacgtgaccgagttcccccactaccatagacacgatggtggtttccccctgcccaccgctttcgctcacgagtaccacaactggctgcgtagccccttctcccgttactccgctacctgccccaacgtgctgcactccgtgatgaccctggctgctatgctgtacaagatctcccccgtgtccctggtgctgcagaccaaggctcacatccaccccggtttcgctctgaccgctgtgcgtaccgacaccttcgaggtggacatgctgctgtactccggcaagtcctgcacctccgtcatcatcaacaaccccatcgtgaccaaggaagagagggacatctccaccacctaccacgtgacccagaacatcaacaccgtggacatgggcctgggttacacctccaacacttgcgtggcctacgtgaaccgcgtccgcaccgacatgggtgtccgtgtgcaggacctgttccgtgtgttccccatgaacgtgtaccgccacgatgaggtggaccgttggatcaggcacgctgctggcgtcgagcgtccccagctgctggacaccgagactatctccatgctgaccttcggttccatgtccgagcgcaacgctgctgctaccgtgcacggccagaaggctgtctgcgagctgatcctgacccctgtgactatggacgtgaactacttcaagatcaccaacaaccctcgtggtcgtgcttcctgcatgctgggcgtggacccctacgacaccgaggctgccaccaaggctatctacgaccaccgcgaggctgacgctcagaccttcgctgctacccacaacccatgggcttcccaggctggttgcctgtccgacgtcctgtacaacacccgtcaccgcgagcgtctgggctacaactccaagttctactccccctgcgctcagtacttcaacaccgaggaaatcatcgctgccaacaagaccctcttcaagaccatcgacgagtacctgctgcgcgctaaggactgcatccgtggcgacaccgacactcagtacgtgtgcgtcgagggaaccgagcagctgatcgagaacccttgccgtctgacccaagaggctctgcccatcctgtccaccaccaccctggctctgatggaaactaagctgaagggtggcgctggtgctttcgctacctccgagactcacttcggcaactacgtcgtgggagagatcatccccctgcagcagtccatgctgttcaacagctaagagctcaagcttgtcgagaagtactagaggatcataatcagccataccacatttgtagaggttttacttgctttaaaaaacctcccacacctccccctgaacctgaaacataaaatgaatgcaattgttgttgttaacttgtttattgcagcttataatggttacaaataaagcaatagcatcacaaatttcacaaataaagcatttttttcactgcattctagttgtggtttgtccaaactcatcaatgtatcttatcatgtctggatctgatcactgcttgagcctagaagatccggctgctaacaaagcccgaaaggaagctgagttggctgctgccaccgctgagcaataactatcataacccccggaatattaatagatcatggagataattaaaatgataaccatctcgcaaataaataagtattttactgttttcgtaacagttttgtaataaaaaaacctataaatattccggattattcataccgtcccaccatcgggcgcggatccgccaccatggctgctatggaagctaacatcttctgcaccttcgaccacaagctgtctatcgctgacgtgggcaagctgaccaagctggtggctgctgtggtgcccatcccccagcgtctgcacctgatcaagcactaccagctgggcctgcaccagttcgtggaccacacccgtggttacgtgcgtctgcgtggcctgctgcgtaacatgaccctgaccctgatgcgtcgtgtcgagggcaaccagatcctgctgcacgtgcccacccacggcctgctgtacaccgtgctgaacaccggtcccgtgacctgggagaagggcgacgctctgtgcgtgctgccccccctgttccacggtcccctggctcgtgaaaacctgttgaccctgggccagtgggagctggtgctgccctggatcgtgcccatgcccctggctctggaaatcaaccagcgcctgctgatcatgggcctgttctccctggaccgttcctacgaagaagtgaaggctgctgtccagcagctgcagaccatcaccttccgtgacgctaccttcaccatccccgaccccgtgatcgaccagcacctcctgatcgacatgaagaccgcttgcctgtccatgtccatggtggctaacctggcttccgagctgaccatgacctacgtccgcaagctggctttggaggactcttccatgctgctggtcaagtgccaagagctgctgatgcgtctggaccgcgagcgttccgtgggcgagcctcgtactcccgctcgtcctcagcacgtgtcccccgacgacgagatcgctcgtctgtccgctctgttcgtgatgctgcgtcagctggacgacctgatccgcgagcaggtcgtgttcaccgtgtgcgacgtgagcccagacaacaagtccgctacctgcatcttcaagggctaaggcgcgccaagcttgtcgagaagtactagaggatcataatcagccataccacatttgtagaggttttacttgctttaaaaaacctcccacacctccccctgaacctgaaacataaaatgaatgcaattgttgttgttaacttgtttattgcagcttataatggttacaaataaagcaatagcatcacaaatttcacaaataaagcatttttttcactgcattctagttgtggtttgtccaaactcatcaatgtatcttatcatgtctggatctgatcactgcttgagcctagaagatccggctgctaacaaagcccgaaaggaagctgagttggctgctgccaccgctgagcaataactatcataacccctaggggcctctaaacgggtcttgaggggttttttgctgaaaggaggaactatatccggatctgaacaggagggacagctgatagaaacagaagccactggagcacctcaaaaacaccatcatacactaaatcagtaagttggcagcatcacccgacgcactttgcgccgaataaatacctgtgacggaagatcacttcgcagaataaataaatcctggtgtccctgttgataccgggaagccctgggccaacttttggcgaaaatgagacgttgatcggcacgtaagaggttccaactttcaccataatgaaataagatcactaccgggcgtattttttgagttatcgagattttcaggagctaaggaagctaaaatggagaaaaaaatcactggatataccaccgttgatatatcccaatggcatcgtaaagaacattttgaggcatttcagtcagttgctcaatgtacctataaccagaccgttcagctggatattacggcctttttaaagaccgtaaagaaaaataagcacaagttttatccggcctttattcacattcttgcccgcctgatgaatgctcatccggaattccgtatggcaatgaaagacggtgagctggtgatatgggatagtgttcacccttgttacaccgttttccatgagcaaactgaaacgttttcatcgctctggagtgaataccacgacgatttccggcagtttctacacatatattcgcaagatgtggcgtgttacggtgaaaacctggcctatttccctaaagggtttattgagaatatgtttttcgtctcagccaatccctgggtgagtttcaccagttttgatttaaacgtggccaatatggacaacttcttcgcccccgttttcaccatgggcaaatattatacgcaaggcgacaaggtgctgatgccgctggcgattcaggttcatcatgccgtttgtgatggcttccatgtcggcagaatgcttaatgaattacaacagtactgcgatgagtggcagggcggggcgtaatttttttaaggcagttattggtgcccttaaacgcctggttgctacgcctgaataagtgataataagcggatgaatggcagaaattcgaaagcaaattcgacccggtcgtcggttcagggcagggtcgttaaatagccgcttatgtctattgctggtttaccggtttattgactaccggaagcagtgtgaccgtgtgcttctcaaatgcctgaggccagtttgctcaggctctccccgtggaggtaataattgacgatatgatcatttattctgcctcccagctgacattcatccggggtcagcaccgtttctgcggactggctttctacgtgttccgcttcctttagcagcccttgcgccctgagtgcttgcggcagcgtgaagctaattctgtcagccgttaagtgttcctgtgtcactcaaaattgctttgagaggctctaagggcttctcagtgcgttacatccctggcttgttgtccacaaccgttaaaccttaaaagctttaaaagccttatatattcttttttttcttataaaacttaaaaccttagaggctatttaagttgctgatttatattaattttattgttcaaacatgagagcttagtacgtgaaacatgagagcttagtacgttagccatgagagcttagtacgttagccatgagggtttagttcgttaaacatgagagcttagtacgttaaacatgagagcttagtacgtgaaacatgagagcttagtacgtactatcaacaggttgaactgctgatcaacagatcctctacgcggccgcggtaccataacttcgtatagcatacattatacgaagttatctggtttaaacgtacccgtagtggctatggcagggcttgccgccccgacgttggctgcgagccctgggccttcacccgaacttgggggttggggtggggaaaaggaagaaacgcgggcgtattggtcccaatggggtctcggtggggtatcgacagagtgccagccctgggaccgaaccccgcgtttatgaacaaacgacccaacacccgtgcgttttattctgtctttttattgccgtcatagcgcgggttccttccggtattgtctccttccgtgtttcagttagcctcccccatctcccggtaccgcatgctatgcatcagctgctagcttagcgagcgtccacagcctggggaccgtaacgggagtgagcgggcaggttcacacgggtctgcttcagctcagggggcaggccagcgtagtacttgtccaggtgacgcagcaggggggggtccagctggtgacgcaggcagaattccttcacagcgttgtacaggccgtagaacagggtgataccctcgggagcagcagcggtggacacgggcagacgcacagcacggttggtacgggtagcctcgttacggatagccaccaccacgttgaacagggaggggggcaccagctcgaaacccagcacgtgttcggtgaagatggaacgaccgtaggacagacgagtcaggtcgtaaccacggcacaggtcgtccacgcaagtgtacacagcgggggaaccgtcgccgcactcggagtaaccgcgcatcacggtcatccaacggggagcggtgtcggaggacagcagggtcagcagagcacgcagctggtcggggttgttgtacagcagggccagggtgtccaggaaagcgtcgtccagcagcacggagttagcagcctcgggggtcacgggacggtaacggatcagctgggacaggggaccgtccctacgggtcacgttgaccaggggacgcagccaggactcgtacttgtcgccctggaacacctctcccagcaggcaacgacgggtcagctcggggcactcagcgggcaccttctcagccacggtgggagccacggacacggtagcggaggacacgatgggcagcagcaggcagcaccacagcagagccacgggaccgggggagaaggagaaaccgcagtcgggacgacggcacatggtggctcgagatcccgggtgatcaagtcttcgtcgagtgattgtaaataaaatgtaatttacagtatagtattttaattaatatacaaatgatttgataataattcttatttaactataatatattgtgttgggttgaattaaaggtccgtatactagtatcgattcgcgacctactccggaatattaatagatcatggagataattaaaatgataaccatctcgcaaataaataagtattttactgttttcgtaacagttttgtaataaaaaaacctataaatattccggattattcataccgtcccaccatcgggcgcggatccgccaccatgtcccccaagaacctgacccccttcctgaccgctctgtggctgctgctgggccactcccgtgtgcctcgtgtgcgtgctgaggaatgctgcgagttcatcaacgtgaaccacccccccgagcgctgctacgacttcaagatgtgcaaccgtttcaccgtggctctgcgttgccccgacggcgaagtgtgctactcccccgaaaagaccgctgagatccgtggtatcgtgaccaccatgacccactccctgacccgtcaggtggtgcacaacaagctgacctcttgcaactacaaccccctgtacctcgaggctgacggtcgtatccgttgcggcaaggtcaacgacaaggctcagtacctgctgggtgctgctggttccgtgccctaccgttggatcaacctcgagtacgacaagatcacccgtatcgtgggcctggaccagtacctcgagtccgtgaagaagcacaagcgtctggacgtgtgccgtgctaagatgggttacatgctgcagtaaaagcttgtcgagaagtactagaggatcataatcagccataccacatttgtagaggttttacttgctttaaaaaacctcccacacctccccctgaacctgaaacataaaatgaatgcaattgttgttgttaacttgtttattgcagcttataatggttacaaataaagcaatagcatcacaaatttcacaaataaagcatttttttcactgcattctagttgtggtttgtccaaactcatcaatgtatcttatcatgtctggatctgatcactgcttgagcctagaagatccggctgctaacaaagcccgaaaggaagctgagttggctgctgtggctagctttgtttaactttaagaaggagatacatctagaccggaatattaatagatcatggagataattaaaatgataaccatctcgcaaataaataagtattttactgttttcgtaacagttttgtaataaaaaaacctataaatattccggattattcataccgtcccaccatcgggcgcggatccgccaccatgctgcgtctgctgctgcgtcaccacttccactgcctgctgctgtgcgctgtgtgggctaccccctgcctggcttccccttggtccaccctgaccgctaaccagaacccctccccaccctggtccaagctgacctactccaagccccacgacgctgctaccttctactgccccttcctgtacccatccccccctcgttccccactgcagttctccggtttccagcgtgtgctgaccggtcccgagtgccgtaacgagactctgtacctgctgtacaaccgcgagggccagaccctggtcgagaggtcctccacctgggtcaagaaggtcatctggtacttgtccggtcgtaaccagaccatcctgcagcgtatgccccgtaccgcttccaagccctccgacggcaacgtgcagatctccgtcgaggacgctaagatcttcggtgctcacatggtgcccaagcagaccaagctgctgcgtttcgtggtcaacgacggcacccgttaccagatgtgcgtgatgaagctcgagtcctgggctcacgtgttccgtgactactccgtgtccttccaagtgcgcctgaccttcaccgaggctaacaaccagacctacaccttctgcacccaccccaacctgatcgtgtaaaagcttgtcgagaagtactagaggatcataatcagccataccacatttgtagaggttttacttgctttaaaaaacctcccacacctccccctgaacctgaaacataaaatgaatgcaattgttgttgttaacttgtttattgcagcttataatggttacaaataaagcaatagcatcacaaatttcacaaataaagcatttttttcactgcattctagttgtggtttgtccaaactcatcaatgtatcttatcatgtctggatctgatcactgcttgagcctagaagatccggctgctaacaaagcccgaaaggaagctgagttggctgctgggtgcctaatgagtgagctaactcacattaattgcccggaatattaatagatcatggagataattaaaatgataaccatctcgcaaataaataagtattttactgttttcgtaacagttttgtaataaaaaaacctataaatattccggattattcataccgtcccaccatcgggcgcggatccgccaccatgcgtctgtgccgtgtgtggctgtccgtgtgcctgtgcgctgtggtgctgggccagtgccagcgtgaaaccgctgagaagaacgactactaccgtgtgccccactactgggacgcttgctcccgtgctctgcccgaccagacccgttacaagtacgtcgagcagctggtggacctgaccctgaactaccactacgacgcttcccacggcctggacaacttcgacgtgctgaagcgtatcaacgtgaccgaggtgtccctgctgatctccgacttccgtcgtcagaaccgtcgtggtggcaccaacaagcgtaccaccttcaacgctgctggttccctggctccccacgctcgttccctcgagttctccgtgcgtctgttcgctaactaaaagcttgtcgagaagtactagaggatcataatcagccataccacatttgtagaggttttacttgctttaaaaaacctcccacacctccccctgaacctgaaacataaaatgaatgcaattgttgttgttaacttgtttattgcagcttataatggttacaaataaagcaatagcatcacaaatttcacaaataaagcatttttttcactgcattctagttgtggtttgtccaaactcatcaatgtatcttatcatgtctggatctgatcactgcttgagcctagaagatccggctgctaacaaagcccgaaaggaagctgagttggctgctgccaccgctgagcaataactatcataacccccggaatattaatagatcatggagataattaaaatgataaccatctcgcaaataaataagtattttactgttttcgtaacagttttgtaataaaaaaacctataaatattccggattattcataccgtcccaccatcgggcgcggatcccggtccgaagcgcgcggaattcaaaggcctaccgtcgacgccaccatggaatcccgtatctggtgcctggtcgtgtgcgtgaacctgtgcatcgtgtgcctgggtgctgctgtgtcctcctcctccacccgtggcacctccgctacccactcccaccactcctcccacaccacctccgccgctcactcccgttccggttccgtgtcccagcgtgtgacctcctcccagaccgtgtcccacggtgtcaacgagactatctacaacaccaccctgaagtacggcgacgtcgtgggtgtcaacaccaccaagtacccctaccgtgtgtgctccatggctcagggcaccgacctgatccgtttcgagcgtaacatcgtgtgcacctccatgaagcccatcaacgaggacctggacgagggtatcatggtggtgtacaagcgcaacatcgtggctcacaccttcaaggtccgcgtgtaccagaaggtgctgaccttccgtcgttcctacgcttacatccacaccacttacctgctgggttccaacaccgagtacgtggcccctcccatgtgggagatccaccacatcaactcccactcccagtgctactcctcttactcccgtgtgatcgctggcaccgtgttcgtggcttaccaccgtgactcctacgagaacaagaccatgcagctgatgcccgacgactactccaacacccactccacccgttacgtgaccgtgaaggaccagtggcactcccgtggttccacctggctgtaccgtgaaacctgcaacctgaactgcatggtcaccatcaccaccgctcgttccaagtacccttaccacttcttcgctacctccaccggcgacgtggtggacatctcccccttctacaacggtactaaccgtaacgcttcctacttcggcgagaacgctgacaagttcttcatcttccccaactacaccatcgtgtccgacttcggtcgtcccaactccgctctggaaacccaccgtctggtggctttcttggagcgtgctgactccgtgatctcctgggacatccaggacgagaagaacgtgacctgccagctgaccttctgggaggcttccgagcgtaccatccgttccgaggctgaggactcctaccacttctccagcgctaagatgaccgctaccttcctgtccaagaaacaagaggtcaacatgtccgactccgccctggactgcgtgcgtgacgaggctatcaacaagctgcagcagatcttcaacacctcctacaaccagacctacgagaagtacggaaacgtgtccgtgttcgagactaccggtggcctggtggtgttctggcagggtatcaagcagaagtccctggtcgagctggaacgtctggctaaccgttcctccctgaacctgacccacaaccgtaccaagcgttccaccgacggcaacaacgctactcacctgtccaacatggaatccgtgcacaacctggtgtacgctcagctgcagttcacctacgacaccctgcgcggttacatcaaccgtgctctggctcagatcgctgaggcttggtgcgtggaccagcgtcgtaccctggaagtgttcaaggaactgtccaagatcaacccctccgctatcctgtccgccatctacaacaagcctatcgctgctcgtttcatgggcgacgtgctgggcctggcttcctgcgtgaccatcaaccagacttccgtgaaggtgctgcgtgacatgaacgtgaaggaatcccccggtcgttgctactcccgtcccgtggtcatcttcaacttcgctaactcctcctacgtgcagtacggccagctgggcgaggacaacgagatcctgctgggcaaccaccgtaccgaggaatgccagctgccctccctgaagatcttcatcgctggcaactccgcttacgaatacgtggactacctgttcaagcgcatgatcgacctgtcctccatctctaccgtggactccatgatcgctctggacatcgaccccctggaaaacaccgacttccgtgtgctggaactgtactcccagaaggaactgcgttccatcaacgtgttcgacctggaagagatcatgcgcgagttcaactcctacaagcagcgtgttaagtacgtcgaggacaaggtggtggaccccctgcccccctacctgaagggactggacgacctgatgtccggcctgggagctgccggcaaggctgtgggtgtcgctatcggtgctgtgggtggtgctgtggcttccgtggtcgagggtgtcgccaccttcctgaagaaccccttcggtgctttcaccatcatcctggtggctatcgctgtggtcatcatcatctacctgatctacacccgtcagcgtcgtctgtgcatgcagcccctgcagaacctgttcccctacctggtgtccgctgacggtactaccgtgacctccggcaacaccaaggacacctccctgcaggctcccccatcctacgaggaatccgtctacaactccggtcgcaagggtcccggtcccccttcctccgacgcttctaccgctgctcccccatacaccaacgagcaggcttaccagatgctgctggctctcgtgcgtctggacgctgagcagcgtgcacagcagaacggcaccgactccctggacggccagaccggaacccaggacaagggccagaagcccaacctgctggaccgtctgcgtcaccgcaagaacggttaccgtcacctgaaggactccgacgaggaagagaacgtctaaggcgcgccaagcttgtcgagaagtactagagatcataatcagccataccacatttgtagaggttttacttgctttaaaaaacctcccacacctccccctgaacctgaaacataaaatgaatgcaattgttgttgttaacttgtttattgcagcttataatggttacaaataaagcaatagcatcacaaatttcacaaataaagcatttttttcactgcattctagttgtggtttgtccaaactcatcaatgtatcttatcatgtctggatctgatcactgcttgagcctagaagatccggctgctaacaaagcccgaaaggaagctgggaatattaatagatcatggagataattaaaatgataaccatctcgcaaataaataagtattttactgttttcgtaacagttttgtaataaaaaaacctataaatattccggattattcataccgtcccaccatcgggcgcggatccgccaccatgcgtcccggcctgccctcctacctgatcgtgctggctgtgtgcctgctgtcccacctcctgtcctcccgttacggtgctgaggctatctccgagcccctggacaaggctttccacctcctgctgaacacctacggtcgtcctatccgtttcctgcgcgagaacaccacccagtgcacctacaactcctccctgcgcaactccaccgtcgtccgcgagaacgctatctccttcaacttcttccagtcctacaaccagtactacgtgttccacatgccccgttgcctgttcgctggtcccctggctgagcagttcctgaaccaggtggacctgaccgagactctcgagcgttaccagcagcgtctgaacacttacgctctggtgtccaaggacctggcttcctaccgttccttcagccagcagctgaaggctcaggactccctgggcgagcagcccaccactgtgcctccccctatcgacctgtccatcccccacgtgtggatgcccccccagaccactcctcacggctggaccgagtcccacaccacctccggactgcaccgtccccacttcaaccagacctgcatcctgttcgacggtcacgacctgctgttctccaccgtgaccccctgcctgcaccagggcttctacctcatcgacgagctgcgttacgtgaagatcaccctgaccgaggatttcttcgtggtcaccgtgtccatcgacgacgacacccccatgctgctgatcttcggtcacctcccccgtgtgctgttcaaggctccctaccagcgtgacaacttcatcctgcgtcagaccgagaagcacgagctgctggtgctggtcaagaaggaccagctgaaccgtcactcttacctgaaggaccccgacttcctggacgctgctctggacttcaactacctggacctgtccgctctgctgaggaactccttccaccgttacgctgtggacgtgctgaagtccggtcgttgccagatgctggaccgtcgtaccgtcgagatggctttcgcttacgccctggctctgttcgctgctgctcgtcaagaagaggctggcgctcaggtgtccgtgccccgtgctctggaccgtcaggctgctctgctgcagatccaagagttcatgatcacttgcctgtcccagaccccccctcgtaccaccctgctgctgtaccccaccgctgtggacctggctaagcgtgctctgtggacccccaaccagatcaccgacatcacctccctcgtgcgtctggtgtacatcctgtccaagcagaaccagcagcacctgatcccccagtgggctctgcgtcagatcgctgacttcgctctgaagctgcacaagacccacctggcttcattcctcagcgctttcgctcgccaagagctgtacctgatgggttccctggtgcactccatgctggtgcacaccaccgagcgtcgcgagatcttcatcgtggaaaccggcctgtgctccctggccgagctgtcccacttcacccagctgctggctcacccccaccacgagtacctgtccgacctgtacaccccctgctcctcttccggtcgtcgtgaccactccctggaacgtctgacccgtctgttccccgacgctaccgtgcctaccaccgtgcctgctgctctgtccatcctgtctaccatgcagccctccaccctggaaaccttccccgacctgttctgcctgcctctgggcgagtccttctccgctctgaccgtgtccgagcacgtgtcctacgtggtcaccaaccagtacctgatcaagggcatctcctaccccgtgtccaccaccgtcgtgggccagtccctgatcatcacccagaccgactcccagaccaagtgcgagctgacccgtaacatgcacaccactcactccatcaccgctgctctgaacatctccctcgagaactgcgctttctgccagtccgctctgttggagtacgacgacactcagggtgtcatcaacatcatgtacatgcacgactccgacgacgtgctgttcgctctggacccctacaacgaggtggtggtgtcctccccccgtacccactacctgatgctgctgaagaacggcaccgtgctggaagtgaccgacgtggtggtggacgctaccgaccgtctgctgatgatgtccgtgtacgctctgtccgctatcatcggcatctacctgctgtaccgtatgctgaagacctgctaaggcgccaagctttgtcgagaagtactagaggatcataatcagccataccacatttgtagaggttttacttgctttaaaaaacctcccacacctccccctgaacctgaaacataaaatgaatgcaattgttgttgttaacttgtttattgcagcttataatggttacaaataaagcaatagcatcacaaatttcacaaataaagcatttttttcactgcattctagttgtggtttgtccaaactcatcaatgtatcttatcatgtctggatctgatcactgcttgagcctagaagatccggctgctaacaaagcccgaaaggaagctgagttggctgctgccaccgctgagcaataactatcataacccctaggagatccgaaccagataagtgaaatctagttccaaactattttgtcatttttaattttcgtattagcttacgacgctacacccagttcccatctattttgtcactcttccctaaataatccttaaaaactccatttccacccctcccagttcccaactattttgtccgcccaca

SEQ ID NO: 37 - DNA, 21120 bp, Artificial Sequence
  Synthetic construct
ttgttccagtttggaacaagagtccactattaaagaacgtggactccaacgtcaaagggcgaaaaaccgtctatcagggcgatggcccactacgtgaaccatcaccctaatcaagttttttggggtcgaggtgccgtaaagcactaaatcggaaccctaaagggagcccccgatttagagcttgacggggaaagccggcgaacgtggcgagaaaggaagggaagaaagcgaaaggagcgggcgctagggcgctggcaagtgtagcggtcacgctgcgcgtaaccaccacacccgccgcgcttaatgcgccgctacagggcgcgtccattcgccattcaggctgcgcaactgttgggaagggcgatcggtgcgggcctcttcgctattacgccagctggcgaaagggggatgtgctgcaaggcgattaagttgggtaacgccagggttttcccagtcacgacgttgtaaaacgacggccagtgcatagaccagccgcgtaacctggcaaaatcggttacggttgagtaataaatggatgccctgcgtaagcgggtgtgggcggacaataaagtcttaaactgaacaaaatagatctaaactatgacaataaagtcttaaactagacagaatagttgtaaactgaaatcagtccagttatgctgtgaaaaagcatactggacttttgttatggctaaagcaaactcttcattttctgaagtgcaaattgcccgtcgtattaaagaggggcgtggccaagggcatggtaaagactatattcgcggcgttgtgacaatttaccgaacaactccgcggccgggaagccgatctcggcttgaacgaattgttaggtggcggtacttgggtcgatatcaaagtgcatcacttcttcccgtatgcccaactttgtatagagagccactgcgggatcgtcaccgtaatctgcttgcacgtagatcacataagcaccaagcgcgttggcctcatgcttgaggagattgatgagcgcggtggcaatgccctgcctccggtgctcgccggagactgcgagatcatagatatagatctcactacgcggctgctcaaacttgggcagaacgtaagccgcgagagcgccaacaaccgcttcttggtcgaaggcagcaagcgcgatgaatgtcttactacggagcaagttcccgaggtaatcggagtccggctgatgttgggagtaggtggctacgtctccgaactcacgaccgaaaagatcaagagcagcccgcatggatttgacttggtcagggccgagcctacatgtgcgaatgatgcccatacttgagccacctaactttgttttagggcgactgccctgctgcgtaacatcgttgctgctgcgtaacatcgttgctgctccataacatcaaacatcgacccacggcgtaacgcgcttgctgcttggatgcccgaggcatagactgtacaaaaaaacagtcataacaagccatgaaaaccgccactgcgccgttaccaccgctgcgttcggtcaaggttctggaccagttgcgtgagcgcatacgctacttgcattacagtttacgaaccgaacaggcttatgtcaactgggtttgtgccttcatccgtttccacggtgtgcgtcacccggcaaccttgggcagcagcgaagtcgaggcatttctgtcctggctggcgaacgagcgcaaggtttcggtctccacgcatcgtcaggcattggcggccttgctgttcttctacggcaaggtgctgtgcacggatctgcccttgcttcaggagatcggtagacctcggccgtcgcggcgcttgccggtggtgctgaccccggatgaagtggttcgcatcctcggttttctggaaggcgagcatcgtttgttcgcccaggactctagctatagttctagtggttggctacagctttgtttgtactatcaacaggttgaactgctgatcaacagatcctctacgcggccgcggtaccataacttcgtatagcatacattatacgaagttatctggtttaaacgtacccgtagtggctatggcagggcttgccgccccgacgttggctgcgagccctgggccttcacccgaacttgggggttggggtggggaaaaggaagaaacgcgggcgtattggtcccaatggggtctcggtggggtatcgacagagtgccagccctgggaccgaaccccgcgtttatgaacaaacgacccaacacccgtgcgttttattctgtctttttattgccgtcatagcgcgggttccttccggtattgtctccttccgtgtttcagttagcctcccccatctcccggtaccgcatgctatgcatcagctgctagcaccatggctcgagatcccgggtgatcaagtcttcgtcgagtgattgtaaataaaatgtaatttacagtatagtattttaattaatatacaaatgatttgataataattcttatttaactataatatattgtgttgggttgaattaaaggtccgtatactagtatcgattcgcgacctactccggaatattaatagatcatggagataattaaaatgataaccatctcgcaaataaataagtattttactgttttcgtaacagttttgtaataaaaaaacctataaatattccggattattcataccgtcccaccatcgggcgcggatccgccaccatggaaaactggtccgctctggaactgctgcccaaggtcggaatccctaccgacttcctgacccacgtcaagacctccgctggcgaggaaatgttcgaggctctgaggatctactacggcgacgaccccgagcgttacaacatccacttcgaggctatcttcggcaccttctgcaaccgtctggaatgggtgtacttcctgacttccggcctggctgctgctgctcacgctatcaagttccacgacctgaacaagctgaccaccggcaagatgctgttccacgtgcaagtgccccgtgtggcttccggtgctggcctgcctacctcccgtcagaccaccatcatggtcaccaagtactccgagaagtcccccatcaccatccctttcgagctgtccgctgcttgcctgacttacctgcgtgaaaccttcgagggcaccatcctggacaagatcctgaacgtcgaggctatgcacaccgtgctgcgtgctctgaagaacaccgctgacgctatggaacgtggcctgatccacagcttcctccagaccctgctgaggaaggctcccccctacttcgtggtgcagaccctggtcgagaacgctaccctggctcgtcaggctctgaaccgtatccagcgctccaacatcctgcagtccttcaaggctaagatgctggctaccctgttcctgctgaaccgtacccgtgaccgtgactacgtgctgaagttcctgacccgtctggctgaggctgctaccgactccatcctcgacaaccctactacctacaccacctcctccggtgctaagatctccggtgtcatggtgtccaccgctaacgtgatgcagatcatcatgtccctgctgtcctcccacatcactaaggaaaccgtgtccgctcccgctacctacggcaacttcgtgctgtcccccgagaacgctgtgaccgctatctcctaccactctatcctggctgacttcaactcctacaaggctcacctgacctccggccagccccacctccccaacgactccctgagccaggctggtgctcactccctgacccccctgtccatggacgtgatccgtctgggcgaaaagaccgtgatcatggaaaacctgcgtcgcgtgtacaagaacaccgacaccaaggaccccctggaacgtaacgtggacctgaccttcttcttccccgtgggcctgtacctgcccgaggaccgtggttacaccaccgtcgagtccaaggtcaagctgaacgacaccgtgcgtaacgctctgcccaccaccgcttacctgctgaacagggaccgtgctgtgcaaaagatcgacttcgtggacgctctcaagaccctgtgccaccccgtgctgcacgagcctgctccatgcctgcaggctttcaccgagcgtggtcccccatccgagcccgctatgcagcgtctgctggaatgccgtttccagcaagagcccatgggtggtgctgctcgtcgtatcccccacttctaccgtgtgcgccgcgaggtgccccgtaccgtgaacgagatgaagcaggacttcgtggtcaccgacttctacaaggttggaaacatcaccctgtacaccgagctgcaccctttcttcgacttcacccactgccaagagaactccgagactgtggctctgtgcaccccccgtatcgtgatcggcaacctgcccgacggcctggctcccggtcccttccacgagctgaggacctgggagatcatggaacacatgcgcctgcgtcccccacccgactacgaggaaaccctgcgtctgttcaagaccaccgtgacctcccccaactaccccgagctgtgctacctggtggacgtgctggtgcacggcaacgctgacgctttcctgctgatccgcgctttcatcgctcgttgcatcgtgaacatgttccacacccgtcagctgctggtgttcgctcactcctacgctctggtcaccctgatcgctgagcacctggctgacggtgctctgcccccccagctcctgttccactaccgtaacctggtggctgtgctgcgcctggtcacccgtatctccgctctgcccggcctgaacaacggccagctggctgaggaacccctgtccgcttacgtgaacgctctgcacgaccacaggctgtggccccccttcgtgacccacctccctcgtaacatggaaggtgtccaggtggtggctgatcgtcagcccctgaaccccgctaacatcgaggctcgtcaccacggtgtctccgacgtgccccgtctgggtgctatggacgctgacgagcccctgttcgtggacgactaccgtgctaccgacgacgagtggaccctgcaaaaggtgttctacctgtgcctgatccccgctatgaccaacaaccgtgcttgcggcctgggcctgaacctcaagactctgctggtggacctgttctaccgtcccgccttcctgctcatgcccgctgctaccgctgtgtccacctccggcaccacctccaaggaatccacctctggtgtcacccccgaggactccgtggctgctcagcgtcaggctgtgggcgagatgctgaccgagctggtcgaggacgtggccaccgacgctcacacccctctgctgcaggcttgccgcgagctgttcctggctgtgcagttcgtgggcgagcacgtgaaggtgctggaagtgcgtgctcccctggaccacgctcagaggcagggactgcccgacttcatctcccgtcagcatgtgctgtacaacggttgctgcgtcgtgaccgctcctaagaccctgatcgagtactccctgcccgtgcccttccaccgtttctactccaaccccaccatctgcgctgctctgtccgacgacatcaagcgttacgtgaccgagttcccccactaccatagacacgatggtggtttccccctgcccaccgctttcgctcacgagtaccacaactggctgcgtagccccttctcccgttactccgctacctgccccaacgtgctgcactccgtgatgaccctggctgctatgctgtacaagatctcccccgtgtccctggtgctgcagaccaaggctcacatccaccccggtttcgctctgaccgctgtgcgtaccgacaccttcgaggtggacatgctgctgtactccggcaagtcctgcacctccgtcatcatcaacaaccccatcgtgaccaaggaagagagggacatctccaccacctaccacgtgacccagaacatcaacaccgtggacatgggcctgggttacacctccaacacttgcgtggcctacgtgaaccgcgtccgcaccgacatgggtgtccgtgtgcaggacctgttccgtgtgttccccatgaacgtgtaccgccacgatgaggtggaccgttggatcaggcacgctgctggcgtcgagcgtccccagctgctggacaccgagactatctccatgctgaccttcggttccatgtccgagcgcaacgctgctgctaccgtgcacggccagaaggctgtctgcgagctgatcctgacccctgtgactatggacgtgaactacttcaagatcaccaacaaccctcgtggtcgtgcttcctgcatgctgggcgtggacccctacgacaccgaggctgccaccaaggctatctacgaccaccgcgaggctgacgctcagaccttcgctgctacccacaacccatgggcttcccaggctggttgcctgtccgacgtcctgtacaacacccgtcaccgcgagcgtctgggctacaactccaagttctactccccctgcgctcagtacttcaacaccgaggaaatcatcgctgccaacaagaccctcttcaagaccatcgacgagtacctgctgcgcgctaaggactgcatccgtggcgacaccgacactcagtacgtgtgcgtcgagggaaccgagcagctgatcgagaacccttgccgtctgacccaagaggctctgcccatcctgtccaccaccaccctggctctgatggaaactaagctgaagggtggcgctggtgctttcgctacctccgagactcacttcggcaactacgtcgtgggagagatcatccccctgcagcagtccatgctgttcaacagctaagagctcaagcttgtcgagaagtactagaggatcataatcagccataccacatttgtagaggttttacttgctttaaaaaacctcccacacctccccctgaacctgaaacataaaatgaatgcaattgttgttgttaacttgtttattgcagcttataatggttacaaataaagcaatagcatcacaaatttcacaaataaagcatttttttcactgcattctagttgtggtttgtccaaactcatcaatgtatcttatcatgtctggatctgatcactgcttgagcctagaagatccggctgctaacaaagcccgaaaggaagctgagttggctgctgccaccgctgagcaataactatcataacccccggaatattaatagatcatggagataattaaaatgataaccatctcgcaaataaataagtattttactgttttcgtaacagttttgtaataaaaaaacctataaatattccggattattcataccgtcccaccatcgggcgcggatccgccaccatggctgctatggaagctaacatcttctgcaccttcgaccacaagctgtctatcgctgacgtgggcaagctgaccaagctggtggctgctgtggtgcccatcccccagcgtctgcacctgatcaagcactaccagctgggcctgcaccagttcgtggaccacacccgtggttacgtgcgtctgcgtggcctgctgcgtaacatgaccctgaccctgatgcgtcgtgtcgagggcaaccagatcctgctgcacgtgcccacccacggcctgctgtacaccgtgctgaacaccggtcccgtgacctgggagaagggcgacgctctgtgcgtgctgccccccctgttccacggtcccctggctcgtgaaaacctgttgaccctgggccagtgggagctggtgctgccctggatcgtgcccatgcccctggctctggaaatcaaccagcgcctgctgatcatgggcctgttctccctggaccgttcctacgaagaagtgaaggctgctgtccagcagctgcagaccatcaccttccgtgacgctaccttcaccatccccgaccccgtgatcgaccagcacctcctgatcgacatgaagaccgcttgcctgtccatgtccatggtggctaacctggcttccgagctgaccatgacctacgtccgcaagctggctttggaggactcttccatgctgctggtcaagtgccaagagctgctgatgcgtctggaccgcgagcgttccgtgggcgagcctcgtactcccgctcgtcctcagcacgtgtcccccgacgacgagatcgctcgtctgtccgctctgttcgtgatgctgcgtcagctggacgacctgatccgcgagcaggtcgtgttcaccgtgtgcgacgtgagcccagacaacaagtccgctacctgcatcttcaagggctaaggcgcgccaagcttgtcgagaagtactagaggatcataatcagccataccacatttgtagaggttttacttgctttaaaaaacctcccacacctccccctgaacctgaaacataaaatgaatgcaattgttgttgttaacttgtttattgcagcttataatggttacaaataaagcaatagcatcacaaatttcacaaataaagcatttttttcactgcattctagttgtggtttgtccaaactcatcaatgtatcttatcatgtctggatctgatcactgcttgagcctagaagatccggctgctaacaaagcccgaaaggaagctgagttggctgctgccaccgctgagcaataactatcataacccctaggggcctctaaacgggtcttgaggggttttttgctgaaaggaggaactatatccggatctgaacaggagggacagctgatagaaacagaagccactggagcacctcaaaaacaccatcatacactaaatcagtaagttggcagcatcacccgacgcactttgcgccgaataaatacctgtgacggaagatcacttcgcagaataaataaatcctggtgtccctgttgataccgggaagccctgggccaacttttggcgaaaatgagacgttgatcggcacgtaagaggttccaactttcaccataatgaaataagatcactaccgggcgtattttttgagttatcgagattttcaggagctaaggaagctaaaatggagaaaaaaatcactggatataccaccgttgatatatcccaatggcatcgtaaagaacattttgaggcatttcagtcagttgctcaatgtacctataaccagaccgttcagctggatattacggcctttttaaagaccgtaaagaaaaataagcacaagttttatccggcctttattcacattcttgcccgcctgatgaatgctcatccggaattccgtatggcaatgaaagacggtgagctggtgatatgggatagtgttcacccttgttacaccgttttccatgagcaaactgaaacgttttcatcgctctggagtgaataccacgacgatttccggcagtttctacacatatattcgcaagatgtggcgtgttacggtgaaaacctggcctatttccctaaagggtttattgagaatatgtttttcgtctcagccaatccctgggtgagtttcaccagttttgatttaaacgtggccaatatggacaacttcttcgcccccgttttcaccatgggcaaatattatacgcaaggcgacaaggtgctgatgccgctggcgattcaggttcatcatgccgtttgtgatggcttccatgtcggcagaatgcttaatgaattacaacagtactgcgatgagtggcagggcggggcgtaatttttttaaggcagttattggtgcccttaaacgcctggttgctacgcctgaataagtgataataagcggatgaatggcagaaattcgaaagcaaattcgacccggtcgtcggttcagggcagggtcgttaaatagccgcttatgtctattgctggtttaccggtttattgactaccggaagcagtgtgaccgtgtgcttctcaaatgcctgaggccagtttgctcaggctctccccgtggaggtaataattgacgatatgatcatttattctgcctcccagctgacattcatccggggtcagcaccgtttctgcggactggctttctacgtgttccgcttcctttagcagcccttgcgccctgagtgcttgcggcagcgtgaagctaattctgtcagccgttaagtgttcctgtgtcactcaaaattgctttgagaggctctaagggcttctcagtgcgttacatccctggcttgttgtccacaaccgttaaaccttaaaagctttaaaagccttatatattcttttttttcttataaaacttaaaaccttagaggctatttaagttgctgatttatattaattttattgttcaaacatgagagcttagtacgtgaaacatgagagcttagtacgttagccatgagagcttagtacgttagccatgagggtttagttcgttaaacatgagagcttagtacgttaaacatgagagcttagtacgtgaaacatgagagcttagtacgtactatcaacaggttgaactgctgatcaacagatcctctacgcggccgcggtaccataacttcgtatagcatacattatacgaagttatctggtttaaacgtacccgtagtggctatggcagggcttgccgccccgacgttggctgcgagccctgggccttcacccgaacttgggggttggggtggggaaaaggaagaaacgcgggcgtattggtcccaatggggtctcggtggggtatcgacagagtgccagccctgggaccgaaccccgcgtttatgaacaaacgacccaacacccgtgcgttttattctgtctttttattgccgtcatagcgcgggttccttccggtattgtctccttccgtgtttcagttagcctcccccatctcccggtaccgcatgctatgcatcagctgctagcttagcgagcgtccacagcctggggaccgtaacgggagtgagcgggcaggttcacacgggtctgcttcagctcagggggcaggccagcgtagtacttgtccaggtgacgcagcaggggggggtccagctggtgacgcaggcagaattccttcacagcgttgtacaggccgtagaacagggtgataccctcgggagcagcagcggtggacacgggcagacgcacagcacggttggtacgggtagcctcgttacggatagccaccaccacgttgaacagggaggggggcaccagctcgaaacccagcacgtgttcggtgaagatggaacgaccgtaggacagacgagtcaggtcgtaaccacggcacaggtcgtccacgcaagtgtacacagcgggggaaccgtcgccgcactcggagtaaccgcgcatcacggtcatccaacggggagcggtgtcggaggacagcagggtcagcagagcacgcagctggtcggggttgttgtacagcagggccagggtgtccaggaaagcgtcgtccagcagcacggagttagcagcctcgggggtcacgggacggtaacggatcagctgggacaggggaccgtccctacgggtcacgttgaccaggggacgcagccaggactcgtacttgtcgccctggaacacctctcccagcaggcaacgacgggtcagctcggggcactcagcgggcaccttctcagccacggtgggagccacggacacggtagcggaggacacgatgggcagcagcaggcagcaccacagcagagccacgggaccgggggagaaggagaaaccgcagtcgggacgacggcacatggtggctcgagatcccgggtgatcaagtcttcgtcgagtgattgtaaataaaatgtaatttacagtatagtattttaattaatatacaaatgatttgataataattcttatttaactataatatattgtgttgggttgaattaaaggtccgtatactagtatcgattcgcgacctactccggaatattaatagatcatggagataattaaaatgataaccatctcgcaaataaataagtattttactgttttcgtaacagttttgtaataaaaaaacctataaatattccggattattcataccgtcccaccatcgggcgcggatccgccaccatgaactccaaggacctgacccccttcctgaccaccctgtggctgctgctggaccactcccgtgtgcctcgtgtgcgtgctgaggaatgctgcgaagtgatcaacgtgaaccacccccccgagcgctgctacgacttcaagatgtgcaacctgttcaccgtggctctgcgttgccccgacggcgaagtgtgctactcccccgaaaagaccgctgagatccgtggtatcgtgaccaccatgacccactccctgacccgtcaagtgatccacaacaagctgaccagctgcaactacaaccccctgtacctcgaggctgacggtcgtatccgttgcggcaaggtgtccgacaaggctcagtacctgctgggtgctgctggttccgtgccctaccgttggatcaacctcgagtacgacaagatcacccgtatcgtgggcctggaccagtacctcgagtccgtgaagaagcacaagcgtctggacgtgtgccgtgctaagatgggttacatgctgcagtaaaagcttgtcgagaagtactagaggatcataatcagccataccacatttgtagaggttttacttgctttaaaaaacctcccacacctccccctgaacctgaaacataaaatgaatgcaattgttgttgttaacttgtttattgcagcttataatggttacaaataaagcaatagcatcacaaatttcacaaataaagcatttttttcactgcattctagttgtggtttgtccaaactcatcaatgtatcttatcatgtctggatctgatcactgcttgagcctagaagatccggctgctaacaaagcccgaaaggaagctgagttggctgctgtggctagctttgtttaactttaagaaggagatacatctagaccggaatattaatagatcatggagataattaaaatgataaccatctcgcaaataaataagtattttactgttttcgtaacagttttgtaataaaaaaacctataaatattccggattattcataccgtcccaccatcgggcgcggatccgccaccatgctgcgtctgctgctgcgtcaccacttccactgcctgctgctgtgcgctgtgtgggctaccccctgcctggcttccccttggtccaccctgaccgctaaccagaacccctccccaccctggtccaagctgacctactccaagccccacgacgctgctaccttctactgccccttcctgtacccatccccccctcgttccccactgcagttctccggtttccagcgtgtgctgaccggtcccgagtgccgtaacgagactctgtacctgctgtacaaccgcgagggccagaccctggtcgagaggtcctccacctgggtcaagaaggtcatctggtacttgtccggtcgtaaccagaccatcctgcagcgtatgccccgtaccgcttccaagccctccgacggcaacgtgcagatctccgtcgaggacgctaagatcttcggtgctcacatggtgcccaagcagaccaagctgctgcgtttcgtggtcaacgacggcacccgttaccagatgtgcgtgatgaagctcgagtcctgggctcacgtgttccgtgactactccgtgtccttccaagtgcgcctgaccttcaccgaggctaacaaccagacctacaccttctgcacccaccccaacctgatcgtgtaaaagcttgtcgagaagtactagaggatcataatcagccataccacatttgtagaggttttacttgctttaaaaaacctcccacacctccccctgaacctgaaacataaaatgaatgcaattgttgttgttaacttgtttattgcagcttataatggttacaaataaagcaatagcatcacaaatttcacaaataaagcatttttttcactgcattctagttgtggtttgtccaaactcatcaatgtatcttatcatgtctggatctgatcactgcttgagcctagaagatccggctgctaacaaagcccgaaaggaagctgagttggctgctgggtgcctaatgagtgagctaactcacattaattgcccggaatattaatagatcatggagataattaaaatgataaccatctcgcaaataaataagtattttactgttttcgtaacagttttgtaataaaaaaacctataaatattccggattattcataccgtcccaccatcgggcgcggatccgccaccatgcgtctgtgccgtgtgtggctgtccgtgtgcctgtgcgctgtggtgctgggccagtgccagcgtgaaaccgctgagaagaacgactactaccgtgtgccccactactgggacgcttgctcccgtgctctgcccgaccagacccgttacaagtacgtcgagcagctggtggacctgaccctgaactaccactacgacgcttcccacggcctggacaacttcgacgtgctgaagcgtatcaacgtgaccgaggtgtccctgctgatctccgacttccgtcgtcagaaccgtcgtggtggcaccaacaagcgtaccaccttcaacgctgctggttccctggctccccacgctcgttccctcgagttctccgtgcgtctgttcgctaactaaaagcttgtcgagaagtactagaggatcataatcagccataccacatttgtagaggttttacttgctttaaaaaacctcccacacctccccctgaacctgaaacataaaatgaatgcaattgttgttgttaacttgtttattgcagcttataatggttacaaataaagcaatagcatcacaaatttcacaaataaagcatttttttcactgcattctagttgtggtttgtccaaactcatcaatgtatcttatcatgtctggatctgatcactgcttgagcctagaagatccggctgctaacaaagcccgaaaggaagctgagttggctgctgccaccgctgagcaataactatcataacccccggaatattaatagatcatggagataattaaaatgataaccatctcgcaaataaataagtattttactgttttcgtaacagttttgtaataaaaaaacctataaatattccggattattcataccgtcccaccatcgggcgcggatcccggtccgaagcgcgcggaattcaaaggcctaccgtcgacgccaccatggaatcccgtatctggtgcctggtcgtgtgcgtgaacctgtgcatcgtgtgcctgggtgctgctgtgtcctcctcctccacccgtggcacctccgctacccactcccaccactcctcccacaccacctccgccgctcactcccgttccggttccgtgtcccagcgtgtgacctcctcccagaccgtgtcccacggtgtcaacgagactatctacaacaccaccctgaagtacggcgacgtcgtgggtgtcaacaccaccaagtacccctaccgtgtgtgctccatggctcagggcaccgacctgatccgtttcgagcgtaacatcgtgtgcacctccatgaagcccatcaacgaggacctggacgagggtatcatggtggtgtacaagcgcaacatcgtggctcacaccttcaaggtccgcgtgtaccagaaggtgctgaccttccgtcgttcctacgcttacatccacaccacttacctgctgggttccaacaccgagtacgtggcccctcccatgtgggagatccaccacatcaactcccactcccagtgctactcctcttactcccgtgtgatcgctggcaccgtgttcgtggcttaccaccgtgactcctacgagaacaagaccatgcagctgatgcccgacgactactccaacacccactccacccgttacgtgaccgtgaaggaccagtggcactcccgtggttccacctggctgtaccgtgaaacctgcaacctgaactgcatggtcaccatcaccaccgctcgttccaagtacccttaccacttcttcgctacctccaccggcgacgtggtggacatctcccccttctacaacggtactaaccgtaacgcttcctacttcggcgagaacgctgacaagttcttcatcttccccaactacaccatcgtgtccgacttcggtcgtcccaactccgctctggaaacccaccgtctggtggctttcttggagcgtgctgactccgtgatctcctgggacatccaggacgagaagaacgtgacctgccagctgaccttctgggaggcttccgagcgtaccatccgttccgaggctgaggactcctaccacttctccagcgctaagatgaccgctaccttcctgtccaagaaacaagaggtcaacatgtccgactccgccctggactgcgtgcgtgacgaggctatcaacaagctgcagcagatcttcaacacctcctacaaccagacctacgagaagtacggaaacgtgtccgtgttcgagactaccggtggcctggtggtgttctggcagggtatcaagcagaagtccctggtcgagctggaacgtctggctaaccgttcctccctgaacctgacccacaaccgtaccaagcgttccaccgacggcaacaacgctactcacctgtccaacatggaatccgtgcacaacctggtgtacgctcagctgcagttcacctacgacaccctgcgcggttacatcaaccgtgctctggctcagatcgctgaggcttggtgcgtggaccagcgtcgtaccctggaagtgttcaaggaactgtccaagatcaacccctccgctatcctgtccgccatctacaacaagcctatcgctgctcgtttcatgggcgacgtgctgggcctggcttcctgcgtgaccatcaaccagacttccgtgaaggtgctgcgtgacatgaacgtgaaggaatcccccggtcgttgctactcccgtcccgtggtcatcttcaacttcgctaactcctcctacgtgcagtacggccagctgggcgaggacaacgagatcctgctgggcaaccaccgtaccgaggaatgccagctgccctccctgaagatcttcatcgctggcaactccgcttacgaatacgtggactacctgttcaagcgcatgatcgacctgtcctccatctctaccgtggactccatgatcgctctggacatcgaccccctggaaaacaccgacttccgtgtgctggaactgtactcccagaaggaactgcgttccatcaacgtgttcgacctggaagagatcatgcgcgagttcaactcctacaagcagcgtgttaagtacgtcgaggacaaggtggtggaccccctgcccccctacctgaagggactggacgacctgatgtccggcctgggagctgccggcaaggctgtgggtgtcgctatcggtgctgtgggtggtgctgtggcttccgtggtcgagggtgtcgccaccttcctgaagaaccccttcggtgctttcaccatcatcctggtggctatcgctgtggtcatcatcatctacctgatctacacccgtcagcgtcgtctgtgcatgcagcccctgcagaacctgttcccctacctggtgtccgctgacggtactaccgtgacctccggcaacaccaaggacacctccctgcaggctcccccatcctacgaggaatccgtctacaactccggtcgcaagggtcccggtcccccttcctccgacgcttctaccgctgctcccccatacaccaacgagcaggcttaccagatgctgctggctctcgtgcgtctggacgctgagcagcgtgcacagcagaacggcaccgactccctggacggccagaccggaacccaggacaagggccagaagcccaacctgctggaccgtctgcgtcaccgcaagaacggttaccgtcacctgaaggactccgacgaggaagagaacgtctaaggcgcgccaagcttgtcgagaagtactagagatcataatcagccataccacatttgtagaggttttacttgctttaaaaaacctcccacacctccccctgaacctgaaacataaaatgaatgcaattgttgttgttaacttgtttattgcagcttataatggttacaaataaagcaatagcatcacaaatttcacaaataaagcatttttttcactgcattctagttgtggtttgtccaaactcatcaatgtatcttatcatgtctggatctgatcactgcttgagcctagaagatccggctgctaacaaagcccgaaaggaagctgggaatattaatagatcatggagataattaaaatgataaccatctcgcaaataaataagtattttactgttttcgtaacagttttgtaataaaaaaacctataaatattccggattattcataccgtcccaccatcgggcgcggatccgccaccatgcgtcccggcctgccctcctacctgatcgtgctggctgtgtgcctgctgtcccacctcctgtcctcccgttacggtgctgaggctatctccgagcccctggacaaggctttccacctcctgctgaacacctacggtcgtcctatccgtttcctgcgcgagaacaccacccagtgcacctacaactcctccctgcgcaactccaccgtcgtccgcgagaacgctatctccttcaacttcttccagtcctacaaccagtactacgtgttccacatgccccgttgcctgttcgctggtcccctggctgagcagttcctgaaccaggtggacctgaccgagactctcgagcgttaccagcagcgtctgaacacttacgctctggtgtccaaggacctggcttcctaccgttccttcagccagcagctgaaggctcaggactccctgggcgagcagcccaccactgtgcctccccctatcgacctgtccatcccccacgtgtggatgcccccccagaccactcctcacggctggaccgagtcccacaccacctccggactgcaccgtccccacttcaaccagacctgcatcctgttcgacggtcacgacctgctgttctccaccgtgaccccctgcctgcaccagggcttctacctcatcgacgagctgcgttacgtgaagatcaccctgaccgaggatttcttcgtggtcaccgtgtccatcgacgacgacacccccatgctgctgatcttcggtcacctcccccgtgtgctgttcaaggctccctaccagcgtgacaacttcatcctgcgtcagaccgagaagcacgagctgctggtgctggtcaagaaggaccagctgaaccgtcactcttacctgaaggaccccgacttcctggacgctgctctggacttcaactacctggacctgtccgctctgctgaggaactccttccaccgttacgctgtggacgtgctgaagtccggtcgttgccagatgctggaccgtcgtaccgtcgagatggctttcgcttacgccctggctctgttcgctgctgctcgtcaagaagaggctggcgctcaggtgtccgtgccccgtgctctggaccgtcaggctgctctgctgcagatccaagagttcatgatcacttgcctgtcccagaccccccctcgtaccaccctgctgctgtaccccaccgctgtggacctggctaagcgtgctctgtggacccccaaccagatcaccgacatcacctccctcgtgcgtctggtgtacatcctgtccaagcagaaccagcagcacctgatcccccagtgggctctgcgtcagatcgctgacttcgctctgaagctgcacaagacccacctggcttcattcctcagcgctttcgctcgccaagagctgtacctgatgggttccctggtgcactccatgctggtgcacaccaccgagcgtcgcgagatcttcatcgtggaaaccggcctgtgctccctggccgagctgtcccacttcacccagctgctggctcacccccaccacgagtacctgtccgacctgtacaccccctgctcctcttccggtcgtcgtgaccactccctggaacgtctgacccgtctgttccccgacgctaccgtgcctaccaccgtgcctgctgctctgtccatcctgtctaccatgcagccctccaccctggaaaccttccccgacctgttctgcctgcctctgggcgagtccttctccgctctgaccgtgtccgagcacgtgtcctacgtggtcaccaaccagtacctgatcaagggcatctcctaccccgtgtccaccaccgtcgtgggccagtccctgatcatcacccagaccgactcccagaccaagtgcgagctgacccgtaacatgcacaccactcactccatcaccgctgctctgaacatctccctcgagaactgcgctttctgccagtccgctctgttggagtacgacgacactcagggtgtcatcaacatcatgtacatgcacgactccgacgacgtgctgttcgctctggacccctacaacgaggtggtggtgtcctccccccgtacccactacctgatgctgctgaagaacggcaccgtgctggaagtgaccgacgtggtggtggacgctaccgaccgtctgctgatgatgtccgtgtacgctctgtccgctatcatcggcatctacctgctgtaccgtatgctgaagacctgctaaggcgccaagctttgtcgagaagtactagaggatcataatcagccataccacatttgtagaggttttacttgctttaaaaaacctcccacacctccccctgaacctgaaacataaaatgaatgcaattgttgttgttaacttgtttattgcagcttataatggttacaaataaagcaatagcatcacaaatttcacaaataaagcatttttttcactgcattctagttgtggtttgtccaaactcatcaatgtatcttatcatgtctggatctgatcactgcttgagcctagaagatccggctgctaacaaagcccgaaaggaagctgagttggctgctgccaccgctgagcaataactatcataacccctaggagatccgaaccagataagtgaaatctagttccaaactattttgtcatttttaattttcgtattagcttacgacgctacacccagttcccatctattttgtcactcttccctaaataatccttaaaaactccatttccacccctcccagttcccaactattttgtccgcccaca

SEQ ID NO: 38 - DNA, 21141 bp, Artificial Sequence
  Synthetic construct
ttgttccagtttggaacaagagtccactattaaagaacgtggactccaacgtcaaagggcgaaaaaccgtctatcagggcgatggcccactacgtgaaccatcaccctaatcaagttttttggggtcgaggtgccgtaaagcactaaatcggaaccctaaagggagcccccgatttagagcttgacggggaaagccggcgaacgtggcgagaaaggaagggaagaaagcgaaaggagcgggcgctagggcgctggcaagtgtagcggtcacgctgcgcgtaaccaccacacccgccgcgcttaatgcgccgctacagggcgcgtccattcgccattcaggctgcgcaactgttgggaagggcgatcggtgcgggcctcttcgctattacgccagctggcgaaagggggatgtgctgcaaggcgattaagttgggtaacgccagggttttcccagtcacgacgttgtaaaacgacggccagtgcatagaccagccgcgtaacctggcaaaatcggttacggttgagtaataaatggatgccctgcgtaagcgggtgtgggcggacaataaagtcttaaactgaacaaaatagatctaaactatgacaataaagtcttaaactagacagaatagttgtaaactgaaatcagtccagttatgctgtgaaaaagcatactggacttttgttatggctaaagcaaactcttcattttctgaagtgcaaattgcccgtcgtattaaagaggggcgtggccaagggcatggtaaagactatattcgcggcgttgtgacaatttaccgaacaactccgcggccgggaagccgatctcggcttgaacgaattgttaggtggcggtacttgggtcgatatcaaagtgcatcacttcttcccgtatgcccaactttgtatagagagccactgcgggatcgtcaccgtaatctgcttgcacgtagatcacataagcaccaagcgcgttggcctcatgcttgaggagattgatgagcgcggtggcaatgccctgcctccggtgctcgccggagactgcgagatcatagatatagatctcactacgcggctgctcaaacttgggcagaacgtaagccgcgagagcgccaacaaccgcttcttggtcgaaggcagcaagcgcgatgaatgtcttactacggagcaagttcccgaggtaatcggagtccggctgatgttgggagtaggtggctacgtctccgaactcacgaccgaaaagatcaagagcagcccgcatggatttgacttggtcagggccgagcctacatgtgcgaatgatgcccatacttgagccacctaactttgttttagggcgactgccctgctgcgtaacatcgttgctgctgcgtaacatcgttgctgctccataacatcaaacatcgacccacggcgtaacgcgcttgctgcttggatgcccgaggcatagactgtacaaaaaaacagtcataacaagccatgaaaaccgccactgcgccgttaccaccgctgcgttcggtcaaggttctggaccagttgcgtgagcgcatacgctacttgcattacagtttacgaaccgaacaggcttatgtcaactgggtttgtgccttcatccgtttccacggtgtgcgtcacccggcaaccttgggcagcagcgaagtcgaggcatttctgtcctggctggcgaacgagcgcaaggtttcggtctccacgcatcgtcaggcattggcggccttgctgttcttctacggcaaggtgctgtgcacggatctgcccttgcttcaggagatcggtagacctcggccgtcgcggcgcttgccggtggtgctgaccccggatgaagtggttcgcatcctcggttttctggaaggcgagcatcgtttgttcgcccaggactctagctatagttctagtggttggctacagctttgtttgtactatcaacaggttgaactgctgatcaacagatcctctacgcggccgcggtaccataacttcgtatagcatacattatacgaagttatctggtttaaacgtacccgtagtggctatggcagggcttgccgccccgacgttggctgcgagccctgggccttcacccgaacttgggggttggggtggggaaaaggaagaaacgcgggcgtattggtcccaatggggtctcggtggggtatcgacagagtgccagccctgggaccgaaccccgcgtttatgaacaaacgacccaacacccgtgcgttttattctgtctttttattgccgtcatagcgcgggttccttccggtattgtctccttccgtgtttcagttagcctcccccatctcccggtaccgcatgctatgcatcagctgctagcaccatggctcgagatcccgggtgatcaagtcttcgtcgagtgattgtaaataaaatgtaatttacagtatagtattttaattaatatacaaatgatttgataataattcttatttaactataatatattgtgttgggttgaattaaaggtccgtatactagtatcgattcgcgacctactccggaatattaatagatcatggagataattaaaatgataaccatctcgcaaataaataagtattttactgttttcgtaacagttttgtaataaaaaaacctataaatattccggattattcataccgtcccaccatcgggcgcggatccgccaccatggaaaactggtccgctctggaactgctgcccaaggtcggaatccctaccgacttcctgacccacgtcaagacctccgctggcgaggaaatgttcgaggctctgaggatctactacggcgacgaccccgagcgttacaacatccacttcgaggctatcttcggcaccttctgcaaccgtctggaatgggtgtacttcctgacttccggcctggctgctgctgctcacgctatcaagttccacgacctgaacaagctgaccaccggcaagatgctgttccacgtgcaagtgccccgtgtggcttccggtgctggcctgcctacctcccgtcagaccaccatcatggtcaccaagtactccgagaagtcccccatcaccatccctttcgagctgtccgctgcttgcctgacttacctgcgtgaaaccttcgagggcaccatcctggacaagatcctgaacgtcgaggctatgcacaccgtgctgcgtgctctgaagaacaccgctgacgctatggaacgtggcctgatccacagcttcctccagaccctgctgaggaaggctcccccctacttcgtggtgcagaccctggtcgagaacgctaccctggctcgtcaggctctgaaccgtatccagcgctccaacatcctgcagtccttcaaggctaagatgctggctaccctgttcctgctgaaccgtacccgtgaccgtgactacgtgctgaagttcctgacccgtctggctgaggctgctaccgactccatcctcgacaaccctactacctacaccacctcctccggtgctaagatctccggtgtcatggtgtccaccgctaacgtgatgcagatcatcatgtccctgctgtcctcccacatcactaaggaaaccgtgtccgctcccgctacctacggcaacttcgtgctgtcccccgagaacgctgtgaccgctatctcctaccactctatcctggctgacttcaactcctacaaggctcacctgacctccggccagccccacctccccaacgactccctgagccaggctggtgctcactccctgacccccctgtccatggacgtgatccgtctgggcgaaaagaccgtgatcatggaaaacctgcgtcgcgtgtacaagaacaccgacaccaaggaccccctggaacgtaacgtggacctgaccttcttcttccccgtgggcctgtacctgcccgaggaccgtggttacaccaccgtcgagtccaaggtcaagctgaacgacaccgtgcgtaacgctctgcccaccaccgcttacctgctgaacagggaccgtgctgtgcaaaagatcgacttcgtggacgctctcaagaccctgtgccaccccgtgctgcacgagcctgctccatgcctgcaggctttcaccgagcgtggtcccccatccgagcccgctatgcagcgtctgctggaatgccgtttccagcaagagcccatgggtggtgctgctcgtcgtatcccccacttctaccgtgtgcgccgcgaggtgccccgtaccgtgaacgagatgaagcaggacttcgtggtcaccgacttctacaaggttggaaacatcaccctgtacaccgagctgcaccctttcttcgacttcacccactgccaagagaactccgagactgtggctctgtgcaccccccgtatcgtgatcggcaacctgcccgacggcctggctcccggtcccttccacgagctgaggacctgggagatcatggaacacatgcgcctgcgtcccccacccgactacgaggaaaccctgcgtctgttcaagaccaccgtgacctcccccaactaccccgagctgtgctacctggtggacgtgctggtgcacggcaacgctgacgctttcctgctgatccgcgctttcatcgctcgttgcatcgtgaacatgttccacacccgtcagctgctggtgttcgctcactcctacgctctggtcaccctgatcgctgagcacctggctgacggtgctctgcccccccagctcctgttccactaccgtaacctggtggctgtgctgcgcctggtcacccgtatctccgctctgcccggcctgaacaacggccagctggctgaggaacccctgtccgcttacgtgaacgctctgcacgaccacaggctgtggccccccttcgtgacccacctccctcgtaacatggaaggtgtccaggtggtggctgatcgtcagcccctgaaccccgctaacatcgaggctcgtcaccacggtgtctccgacgtgccccgtctgggtgctatggacgctgacgagcccctgttcgtggacgactaccgtgctaccgacgacgagtggaccctgcaaaaggtgttctacctgtgcctgatccccgctatgaccaacaaccgtgcttgcggcctgggcctgaacctcaagactctgctggtggacctgttctaccgtcccgccttcctgctcatgcccgctgctaccgctgtgtccacctccggcaccacctccaaggaatccacctctggtgtcacccccgaggactccgtggctgctcagcgtcaggctgtgggcgagatgctgaccgagctggtcgaggacgtggccaccgacgctcacacccctctgctgcaggcttgccgcgagctgttcctggctgtgcagttcgtgggcgagcacgtgaaggtgctggaagtgcgtgctcccctggaccacgctcagaggcagggactgcccgacttcatctcccgtcagcatgtgctgtacaacggttgctgcgtcgtgaccgctcctaagaccctgatcgagtactccctgcccgtgcccttccaccgtttctactccaaccccaccatctgcgctgctctgtccgacgacatcaagcgttacgtgaccgagttcccccactaccatagacacgatggtggtttccccctgcccaccgctttcgctcacgagtaccacaactggctgcgtagccccttctcccgttactccgctacctgccccaacgtgctgcactccgtgatgaccctggctgctatgctgtacaagatctcccccgtgtccctggtgctgcagaccaaggctcacatccaccccggtttcgctctgaccgctgtgcgtaccgacaccttcgaggtggacatgctgctgtactccggcaagtcctgcacctccgtcatcatcaacaaccccatcgtgaccaaggaagagagggacatctccaccacctaccacgtgacccagaacatcaacaccgtggacatgggcctgggttacacctccaacacttgcgtggcctacgtgaaccgcgtccgcaccgacatgggtgtccgtgtgcaggacctgttccgtgtgttccccatgaacgtgtaccgccacgatgaggtggaccgttggatcaggcacgctgctggcgtcgagcgtccccagctgctggacaccgagactatctccatgctgaccttcggttccatgtccgagcgcaacgctgctgctaccgtgcacggccagaaggctgtctgcgagctgatcctgacccctgtgactatggacgtgaactacttcaagatcaccaacaaccctcgtggtcgtgcttcctgcatgctgggcgtggacccctacgacaccgaggctgccaccaaggctatctacgaccaccgcgaggctgacgctcagaccttcgctgctacccacaacccatgggcttcccaggctggttgcctgtccgacgtcctgtacaacacccgtcaccgcgagcgtctgggctacaactccaagttctactccccctgcgctcagtacttcaacaccgaggaaatcatcgctgccaacaagaccctcttcaagaccatcgacgagtacctgctgcgcgctaaggactgcatccgtggcgacaccgacactcagtacgtgtgcgtcgagggaaccgagcagctgatcgagaacccttgccgtctgacccaagaggctctgcccatcctgtccaccaccaccctggctctgatggaaactaagctgaagggtggcgctggtgctttcgctacctccgagactcacttcggcaactacgtcgtgggagagatcatccccctgcagcagtccatgctgttcaacagctaagagctcaagcttgtcgagaagtactagaggatcataatcagccataccacatttgtagaggttttacttgctttaaaaaacctcccacacctccccctgaacctgaaacataaaatgaatgcaattgttgttgttaacttgtttattgcagcttataatggttacaaataaagcaatagcatcacaaatttcacaaataaagcatttttttcactgcattctagttgtggtttgtccaaactcatcaatgtatcttatcatgtctggatctgatcactgcttgagcctagaagatccggctgctaacaaagcccgaaaggaagctgagttggctgctgccaccgctgagcaataactatcataacccccggaatattaatagatcatggagataattaaaatgataaccatctcgcaaataaataagtattttactgttttcgtaacagttttgtaataaaaaaacctataaatattccggattattcataccgtcccaccatcgggcgcggatccgccaccatggctgctatggaagctaacatcttctgcaccttcgaccacaagctgtctatcgctgacgtgggcaagctgaccaagctggtggctgctgtggtgcccatcccccagcgtctgcacctgatcaagcactaccagctgggcctgcaccagttcgtggaccacacccgtggttacgtgcgtctgcgtggcctgctgcgtaacatgaccctgaccctgatgcgtcgtgtcgagggcaaccagatcctgctgcacgtgcccacccacggcctgctgtacaccgtgctgaacaccggtcccgtgacctgggagaagggcgacgctctgtgcgtgctgccccccctgttccacggtcccctggctcgtgaaaacctgttgaccctgggccagtgggagctggtgctgccctggatcgtgcccatgcccctggctctggaaatcaaccagcgcctgctgatcatgggcctgttctccctggaccgttcctacgaagaagtgaaggctgctgtccagcagctgcagaccatcaccttccgtgacgctaccttcaccatccccgaccccgtgatcgaccagcacctcctgatcgacatgaagaccgcttgcctgtccatgtccatggtggctaacctggcttccgagctgaccatgacctacgtccgcaagctggctttggaggactcttccatgctgctggtcaagtgccaagagctgctgatgcgtctggaccgcgagcgttccgtgggcgagcctcgtactcccgctcgtcctcagcacgtgtcccccgacgacgagatcgctcgtctgtccgctctgttcgtgatgctgcgtcagctggacgacctgatccgcgagcaggtcgtgttcaccgtgtgcgacgtgagcccagacaacaagtccgctacctgcatcttcaagggctaaggcgcgccaagcttgtcgagaagtactagaggatcataatcagccataccacatttgtagaggttttacttgctttaaaaaacctcccacacctccccctgaacctgaaacataaaatgaatgcaattgttgttgttaacttgtttattgcagcttataatggttacaaataaagcaatagcatcacaaatttcacaaataaagcatttttttcactgcattctagttgtggtttgtccaaactcatcaatgtatcttatcatgtctggatctgatcactgcttgagcctagaagatccggctgctaacaaagcccgaaaggaagctgagttggctgctgccaccgctgagcaataactatcataacccctaggggcctctaaacgggtcttgaggggttttttgctgaaaggaggaactatatccggatctgaacaggagggacagctgatagaaacagaagccactggagcacctcaaaaacaccatcatacactaaatcagtaagttggcagcatcacccgacgcactttgcgccgaataaatacctgtgacggaagatcacttcgcagaataaataaatcctggtgtccctgttgataccgggaagccctgggccaacttttggcgaaaatgagacgttgatcggcacgtaagaggttccaactttcaccataatgaaataagatcactaccgggcgtattttttgagttatcgagattttcaggagctaaggaagctaaaatggagaaaaaaatcactggatataccaccgttgatatatcccaatggcatcgtaaagaacattttgaggcatttcagtcagttgctcaatgtacctataaccagaccgttcagctggatattacggcctttttaaagaccgtaaagaaaaataagcacaagttttatccggcctttattcacattcttgcccgcctgatgaatgctcatccggaattccgtatggcaatgaaagacggtgagctggtgatatgggatagtgttcacccttgttacaccgttttccatgagcaaactgaaacgttttcatcgctctggagtgaataccacgacgatttccggcagtttctacacatatattcgcaagatgtggcgtgttacggtgaaaacctggcctatttccctaaagggtttattgagaatatgtttttcgtctcagccaatccctgggtgagtttcaccagttttgatttaaacgtggccaatatggacaacttcttcgcccccgttttcaccatgggcaaatattatacgcaaggcgacaaggtgctgatgccgctggcgattcaggttcatcatgccgtttgtgatggcttccatgtcggcagaatgcttaatgaattacaacagtactgcgatgagtggcagggcggggcgtaatttttttaaggcagttattggtgcccttaaacgcctggttgctacgcctgaataagtgataataagcggatgaatggcagaaattcgaaagcaaattcgacccggtcgtcggttcagggcagggtcgttaaatagccgcttatgtctattgctggtttaccggtttattgactaccggaagcagtgtgaccgtgtgcttctcaaatgcctgaggccagtttgctcaggctctccccgtggaggtaataattgacgatatgatcatttattctgcctcccagctgacattcatccggggtcagcaccgtttctgcggactggctttctacgtgttccgcttcctttagcagcccttgcgccctgagtgcttgcggcagcgtgaagctaattctgtcagccgttaagtgttcctgtgtcactcaaaattgctttgagaggctctaagggcttctcagtgcgttacatccctggcttgttgtccacaaccgttaaaccttaaaagctttaaaagccttatatattcttttttttcttataaaacttaaaaccttagaggctatttaagttgctgatttatattaattttattgttcaaacatgagagcttagtacgtgaaacatgagagcttagtacgttagccatgagagcttagtacgttagccatgagggtttagttcgttaaacatgagagcttagtacgttaaacatgagagcttagtacgtgaaacatgagagcttagtacgtactatcaacaggttgaactgctgatcaacagatcctctacgcggccgcggtaccataacttcgtatagcatacattatacgaagttatctggtttaaacgtacccgtagtggctatggcagggcttgccgccccgacgttggctgcgagccctgggccttcacccgaacttgggggttggggtggggaaaaggaagaaacgcgggcgtattggtcccaatggggtctcggtggggtatcgacagagtgccagccctgggaccgaaccccgcgtttatgaacaaacgacccaacacccgtgcgttttattctgtctttttattgccgtcatagcgcgggttccttccggtattgtctccttccgtgtttcagttagcctcccccatctcccggtaccgcatgctatgcatcagctgctagcttagcgagcgtccacagcctggggaccgtaacgggagtgagcgggcaggttcacacgggtctgcttcagctcagggggcaggccagcgtagtacttgtccaggtgacgcagcaggggggggtccagctggtgacgcaggcagaattccttcacagcgttgtacaggccgtagaacagggtgataccctcgggagcagcagcggtggacacgggcagacgcacagcacggttggtacgggtagcctcgttacggatagccaccaccacgttgaacagggaggggggcaccagctcgaaacccagcacgtgttcggtgaagatggaacgaccgtaggacagacgagtcaggtcgtaaccacggcacaggtcgtccacgcaagtgtacacagcgggggaaccgtcgccgcactcggagtaaccgcgcatcacggtcatccaacggggagcggtgtcggaggacagcagggtcagcagagcacgcagctggtcggggttgttgtacagcagggccagggtgtccaggaaagcgtcgtccagcagcacggagttagcagcctcgggggtcacgggacggtaacggatcagctgggacaggggaccgtccctacgggtcacgttgaccaggggacgcagccaggactcgtacttgtcgccctggaacacctctcccagcaggcaacgacgggtcagctcggggcactcagcgggcaccttctcagccacggtgggagccacggacacggtagcggaggacacgatgggcagcagcaggcagcaccacagcagagccacgggaccgggggagaaggagaaaccgcagtcgggacgacggcacatggtggctcgagatcccgggtgatcaagtcttcgtcgagtgattgtaaataaaatgtaatttacagtatagtattttaattaatatacaaatgatttgataataattcttatttaactataatatattgtgttgggttgaattaaaggtccgtatactagtatcgattcgcgacctactccggaatattaatagatcatggagataattaaaatgataaccatctcgcaaataaataagtattttactgttttcgtaacagttttgtaataaaaaaacctataaatattccggattattcataccgtcccaccatcgggcgcggatccgccaccatgaactccaaggacctgacccccttcctgaccaccctgtggctgctgctggaccactcccgtgtgcctcgtgtgcgtgctgaggaatgctgcgaagtgatcaacgtgaaccacccccccgagcgctgctacgacttcaagatgtgcaacctgttcaccgtggctctgcgttgccccgacggcgaagtgtgctactcccccgaaaagaccgctgagatccgtggtatcgtgaccaccatgacccactccctgacccgtcaagtgatccacaacaagctgaccagctgcaactacaaccccctgtacctcgaggctgacggtcgtatccgttgcggcaaggtgtccgacaaggctcagtacctgctgggtgctgctggttccgtgccctaccgttggatcaacctcgagtacgacaagatcacccgtatcgtgggcctggaccagtacctcgagtccgtgaagaagcacaagcgtctggacgtgtgccgtgctaagatgggttacatgctgcagtaaaagcttgtcgagaagtactagaggatcataatcagccataccacatttgtagaggttttacttgctttaaaaaacctcccacacctccccctgaacctgaaacataaaatgaatgcaattgttgttgttaacttgtttattgcagcttataatggttacaaataaagcaatagcatcacaaatttcacaaataaagcatttttttcactgcattctagttgtggtttgtccaaactcatcaatgtatcttatcatgtctggatctgatcactgcttgagcctagaagatccggctgctaacaaagcccgaaaggaagctgagttggctgctgtggctagctttgtttaactttaagaaggagatacatctagaccggaatattaatagatcatggagataattaaaatgataaccatctcgcaaataaataagtattttactgttttcgtaacagttttgtaataaaaaaacctataaatattccggattattcataccgtcccaccatcgggcgcggatccgccaccatgctgcgtctgctgctgcgtcaccacttccactgcctgctgctgtgcgctgtgtgggctaccccctgcctggcttccccctggttcaccctgaccgctaaccagaacccctccccaccctggtccaagctgacctaccccaagccccacgacgctgctaccttctactgccccttcctgtacccatccccacctcgttccccatcccagttctccggtttccagcgtgtgtccaccggtcccgagtgccgtaacgagactctgtacctgctgtacaaccgcgagggccagaccctggtcgagaggtcctccacctgggtcaagaaggtcatctggtacttgtccggtcgtaaccagaccatcctgcagcgtatgccccgtaccgcttccaagccctccgacggcaacgtgcagatctccgtcgaggacgctaagatcttcggtgctcacatggtgcccaagcagaccaagctgctgcgtttcgtggtcaacgacggcacccgttaccagatgtgcgtgatgaagctggaatcctgggctcacgtgttccgtgactactccgtgtccttccaagtgcgcctgaccttcaccgaggctaacaaccagacctacaccttctgcacccaccccaacctgatcgtgtaagtcgacaagcttgtcgagaagtactagaggatcataatcagccataccacatttgtagaggttttacttgctttaaaaaacctcccacacctccccctgaacctgaaacataaaatgaatgcaattgttgttgttaacttgtttattgcagcttataatggttacaaataaagcaatagcatcacaaatttcacaaataaagcatttttttcactgcattctagttgtggtttgtccaaactcatcaatgtatcttatcatgtctggatctgatcactgcttgagcctagaagatccggctgctaacaaagcccgaaaggaagctgagttggctgctgggtgcctaatgagtgagctaactcacattaattgcccggaatattaatagatcatggagataattaaaatgataaccatctcgcaaataaataagtattttactgttttcgtaacagttttgtaataaaaaaacctataaatattccggattattcataccgtcccaccatcgggcgcggatccgccaccggatccgccaccatgcgtctgtgccgtgtgtggctgtccgtgtgcctgtgcgctgtggtgctgggacagtgccagcgtgaaaccgctgagaagaacgactactaccgtgtgccccactactgggacgcttgctcccgtgctctgcccgaccagacccgttacaagtacgtcgagcagctggtggacctgaccctgaactaccactacgacgcttcccacggcctggacaacttcgacgtgctgaagcgtatcaacgtgaccgaggtgtccctgctgatctccgacttccgtcgtcagaaccgtcgtggtggcaccaacaagcgtaccaccttcaacgctgctggttccctggctccccacgctcgttccttggagttctccgtgcgtctgttcgccaactaataaaagcttgtcgagaagtactagaggatcataatcagccataccacatttgtagaggttttacttgctttaaaaaacctcccacacctccccctgaacctgaaacataaaatgaatgcaattgttgttgttaacttgtttattgcagcttataatggttacaaataaagcaatagcatcacaaatttcacaaataaagcatttttttcactgcattctagttgtggtttgtccaaactcatcaatgtatcttatcatgtctggatctgatcactgcttgagcctagaagatccggctgctaacaaagcccgaaaggaagctgagttggctgctgccaccgctgagcaataactatcataacccccggaatattaatagatcatggagataattaaaatgataaccatctcgcaaataaataagtattttactgttttcgtaacagttttgtaataaaaaaacctataaatattccggattattcataccgtcccaccatcgggcgcggatcccggtccgaagcgcgcggaattcaaaggcctaccgtcgacgccaccatggaatcccgtatctggtgcctggtcgtgtgcgtgaacctgtgcatcgtgtgcctgggtgctgctgtgtcctcctcctccacccgtggcacctccgctacccactcccaccactcctcccacaccacctccgccgctcactcccgttccggttccgtgtcccagcgtgtgacctcctcccagaccgtgtcccacggtgtcaacgagactatctacaacaccaccctgaagtacggcgacgtcgtgggtgtcaacaccaccaagtacccctaccgtgtgtgctccatggctcagggcaccgacctgatccgtttcgagcgtaacatcgtgtgcacctccatgaagcccatcaacgaggacctggacgagggtatcatggtggtgtacaagcgcaacatcgtggctcacaccttcaaggtccgcgtgtaccagaaggtgctgaccttccgtcgttcctacgcttacatccacaccacttacctgctgggttccaacaccgagtacgtggcccctcccatgtgggagatccaccacatcaactcccactcccagtgctactcctcttactcccgtgtgatcgctggcaccgtgttcgtggcttaccaccgtgactcctacgagaacaagaccatgcagctgatgcccgacgactactccaacacccactccacccgttacgtgaccgtgaaggaccagtggcactcccgtggttccacctggctgtaccgtgaaacctgcaacctgaactgcatggtcaccatcaccaccgctcgttccaagtacccttaccacttcttcgctacctccaccggcgacgtggtggacatctcccccttctacaacggtactaaccgtaacgcttcctacttcggcgagaacgctgacaagttcttcatcttccccaactacaccatcgtgtccgacttcggtcgtcccaactccgctctggaaacccaccgtctggtggctttcttggagcgtgctgactccgtgatctcctgggacatccaggacgagaagaacgtgacctgccagctgaccttctgggaggcttccgagcgtaccatccgttccgaggctgaggactcctaccacttctccagcgctaagatgaccgctaccttcctgtccaagaaacaagaggtcaacatgtccgactccgccctggactgcgtgcgtgacgaggctatcaacaagctgcagcagatcttcaacacctcctacaaccagacctacgagaagtacggaaacgtgtccgtgttcgagactaccggtggcctggtggtgttctggcagggtatcaagcagaagtccctggtcgagctggaacgtctggctaaccgttcctccctgaacctgacccacaaccgtaccaagcgttccaccgacggcaacaacgctactcacctgtccaacatggaatccgtgcacaacctggtgtacgctcagctgcagttcacctacgacaccctgcgcggttacatcaaccgtgctctggctcagatcgctgaggcttggtgcgtggaccagcgtcgtaccctggaagtgttcaaggaactgtccaagatcaacccctccgctatcctgtccgccatctacaacaagcctatcgctgctcgtttcatgggcgacgtgctgggcctggcttcctgcgtgaccatcaaccagacttccgtgaaggtgctgcgtgacatgaacgtgaaggaatcccccggtcgttgctactcccgtcccgtggtcatcttcaacttcgctaactcctcctacgtgcagtacggccagctgggcgaggacaacgagatcctgctgggcaaccaccgtaccgaggaatgccagctgccctccctgaagatcttcatcgctggcaactccgcttacgaatacgtggactacctgttcaagcgcatgatcgacctgtcctccatctctaccgtggactccatgatcgctctggacatcgaccccctggaaaacaccgacttccgtgtgctggaactgtactcccagaaggaactgcgttccatcaacgtgttcgacctggaagagatcatgcgcgagttcaactcctacaagcagcgtgttaagtacgtcgaggacaaggtggtggaccccctgcccccctacctgaagggactggacgacctgatgtccggcctgggagctgccggcaaggctgtgggtgtcgctatcggtgctgtgggtggtgctgtggcttccgtggtcgagggtgtcgccaccttcctgaagaaccccttcggtgctttcaccatcatcctggtggctatcgctgtggtcatcatcatctacctgatctacacccgtcagcgtcgtctgtgcatgcagcccctgcagaacctgttcccctacctggtgtccgctgacggtactaccgtgacctccggcaacaccaaggacacctccctgcaggctcccccatcctacgaggaatccgtctacaactccggtcgcaagggtcccggtcccccttcctccgacgcttctaccgctgctcccccatacaccaacgagcaggcttaccagatgctgctggctctcgtgcgtctggacgctgagcagcgtgcacagcagaacggcaccgactccctggacggccagaccggaacccaggacaagggccagaagcccaacctgctggaccgtctgcgtcaccgcaagaacggttaccgtcacctgaaggactccgacgaggaagagaacgtctaaggcgcgccaagcttgtcgagaagtactagagatcataatcagccataccacatttgtagaggttttacttgctttaaaaaacctcccacacctccccctgaacctgaaacataaaatgaatgcaattgttgttgttaacttgtttattgcagcttataatggttacaaataaagcaatagcatcacaaatttcacaaataaagcatttttttcactgcattctagttgtggtttgtccaaactcatcaatgtatcttatcatgtctggatctgatcactgcttgagcctagaagatccggctgctaacaaagcccgaaaggaagctgggaatattaatagatcatggagataattaaaatgataaccatctcgcaaataaataagtattttactgttttcgtaacagttttgtaataaaaaaacctataaatattccggattattcataccgtcccaccatcgggcgcggatccgccaccatgcgtcccggcctgccctcctacctgatcgtgctggctgtgtgcctgctgtcccacctcctgtcctcccgttacggtgctgaggctatctccgagcccctggacaaggctttccacctcctgctgaacacctacggtcgtcctatccgtttcctgcgcgagaacaccacccagtgcacctacaactcctccctgcgcaactccaccgtcgtccgcgagaacgctatctccttcaacttcttccagtcctacaaccagtactacgtgttccacatgccccgttgcctgttcgctggtcccctggctgagcagttcctgaaccaggtggacctgaccgagactctcgagcgttaccagcagcgtctgaacacttacgctctggtgtccaaggacctggcttcctaccgttccttcagccagcagctgaaggctcaggactccctgggcgagcagcccaccactgtgcctccccctatcgacctgtccatcccccacgtgtggatgcccccccagaccactcctcacggctggaccgagtcccacaccacctccggactgcaccgtccccacttcaaccagacctgcatcctgttcgacggtcacgacctgctgttctccaccgtgaccccctgcctgcaccagggcttctacctcatcgacgagctgcgttacgtgaagatcaccctgaccgaggatttcttcgtggtcaccgtgtccatcgacgacgacacccccatgctgctgatcttcggtcacctcccccgtgtgctgttcaaggctccctaccagcgtgacaacttcatcctgcgtcagaccgagaagcacgagctgctggtgctggtcaagaaggaccagctgaaccgtcactcttacctgaaggaccccgacttcctggacgctgctctggacttcaactacctggacctgtccgctctgctgaggaactccttccaccgttacgctgtggacgtgctgaagtccggtcgttgccagatgctggaccgtcgtaccgtcgagatggctttcgcttacgccctggctctgttcgctgctgctcgtcaagaagaggctggcgctcaggtgtccgtgccccgtgctctggaccgtcaggctgctctgctgcagatccaagagttcatgatcacttgcctgtcccagaccccccctcgtaccaccctgctgctgtaccccaccgctgtggacctggctaagcgtgctctgtggacccccaaccagatcaccgacatcacctccctcgtgcgtctggtgtacatcctgtccaagcagaaccagcagcacctgatcccccagtgggctctgcgtcagatcgctgacttcgctctgaagctgcacaagacccacctggcttcattcctcagcgctttcgctcgccaagagctgtacctgatgggttccctggtgcactccatgctggtgcacaccaccgagcgtcgcgagatcttcatcgtggaaaccggcctgtgctccctggccgagctgtcccacttcacccagctgctggctcacccccaccacgagtacctgtccgacctgtacaccccctgctcctcttccggtcgtcgtgaccactccctggaacgtctgacccgtctgttccccgacgctaccgtgcctaccaccgtgcctgctgctctgtccatcctgtctaccatgcagccctccaccctggaaaccttccccgacctgttctgcctgcctctgggcgagtccttctccgctctgaccgtgtccgagcacgtgtcctacgtggtcaccaaccagtacctgatcaagggcatctcctaccccgtgtccaccaccgtcgtgggccagtccctgatcatcacccagaccgactcccagaccaagtgcgagctgacccgtaacatgcacaccactcactccatcaccgctgctctgaacatctccctcgagaactgcgctttctgccagtccgctctgttggagtacgacgacactcagggtgtcatcaacatcatgtacatgcacgactccgacgacgtgctgttcgctctggacccctacaacgaggtggtggtgtcctccccccgtacccactacctgatgctgctgaagaacggcaccgtgctggaagtgaccgacgtggtggtggacgctaccgaccgtctgctgatgatgtccgtgtacgctctgtccgctatcatcggcatctacctgctgtaccgtatgctgaagacctgctaaggcgccaagctttgtcgagaagtactagaggatcataatcagccataccacatttgtagaggttttacttgctttaaaaaacctcccacacctccccctgaacctgaaacataaaatgaatgcaattgttgttgttaacttgtttattgcagcttataatggttacaaataaagcaatagcatcacaaatttcacaaataaagcatttttttcactgcattctagttgtggtttgtccaaactcatcaatgtatcttatcatgtctggatctgatcactgcttgagcctagaagatccggctgctaacaaagcccgaaaggaagctgagttggctgctgccaccgctgagcaataactatcataacccctaggagatccgaaccagataagtgaaatctagttccaaactattttgtcatttttaattttcgtattagcttacgacgctacacccagttcccatctattttgtcactcttccctaaataatccttaaaaactccatttccacccctcccagttcccaactattttgtccgcccaca

SEQ ID NO: 39 - DNA, 22348 bp, Artificial Sequence
  Synthetic construct
ttgttccagtttggaacaagagtccactattaaagaacgtggactccaacgtcaaagggcgaaaaaccgtctatcagggcgatggcccactacgtgaaccatcaccctaatcaagttttttggggtcgaggtgccgtaaagcactaaatcggaaccctaaagggagcccccgatttagagcttgacggggaaagccggcgaacgtggcgagaaaggaagggaagaaagcgaaaggagcgggcgctagggcgctggcaagtgtagcggtcacgctgcgcgtaaccaccacacccgccgcgcttaatgcgccgctacagggcgcgtccattcgccattcaggctgcgcaactgttgggaagggcgatcggtgcgggcctcttcgctattacgccagctggcgaaagggggatgtgctgcaaggcgattaagttgggtaacgccagggttttcccagtcacgacgttgtaaaacgacggccagtgcatagaccagccgcgtaacctggcaaaatcggttacggttgagtaataaatggatgccctgcgtaagcgggtgtgggcggacaataaagtcttaaactgaacaaaatagatctaaactatgacaataaagtcttaaactagacagaatagttgtaaactgaaatcagtccagttatgctgtgaaaaagcatactggacttttgttatggctaaagcaaactcttcattttctgaagtgcaaattgcccgtcgtattaaagaggggcgtggccaagggcatggtaaagactatattcgcggcgttgtgacaatttaccgaacaactccgcggccgggaagccgatctcggcttgaacgaattgttaggtggcggtacttgggtcgatatcaaagtgcatcacttcttcccgtatgcccaactttgtatagagagccactgcgggatcgtcaccgtaatctgcttgcacgtagatcacataagcaccaagcgcgttggcctcatgcttgaggagattgatgagcgcggtggcaatgccctgcctccggtgctcgccggagactgcgagatcatagatatagatctcactacgcggctgctcaaacttgggcagaacgtaagccgcgagagcgccaacaaccgcttcttggtcgaaggcagcaagcgcgatgaatgtcttactacggagcaagttcccgaggtaatcggagtccggctgatgttgggagtaggtggctacgtctccgaactcacgaccgaaaagatcaagagcagcccgcatggatttgacttggtcagggccgagcctacatgtgcgaatgatgcccatacttgagccacctaactttgttttagggcgactgccctgctgcgtaacatcgttgctgctgcgtaacatcgttgctgctccataacatcaaacatcgacccacggcgtaacgcgcttgctgcttggatgcccgaggcatagactgtacaaaaaaacagtcataacaagccatgaaaaccgccactgcgccgttaccaccgctgcgttcggtcaaggttctggaccagttgcgtgagcgcatacgctacttgcattacagtttacgaaccgaacaggcttatgtcaactgggtttgtgccttcatccgtttccacggtgtgcgtcacccggcaaccttgggcagcagcgaagtcgaggcatttctgtcctggctggcgaacgagcgcaaggtttcggtctccacgcatcgtcaggcattggcggccttgctgttcttctacggcaaggtgctgtgcacggatctgcccttgcttcaggagatcggtagacctcggccgtcgcggcgcttgccggtggtgctgaccccggatgaagtggttcgcatcctcggttttctggaaggcgagcatcgtttgttcgcccaggactctagctatagttctagtggttggctacagctttgtttgtactatcaacaggttgaactgctgatcaacagatcctctacgcggccgcggtaccataacttcgtatagcatacattatacgaagttatctggtttaaacgtacccgtagtggctatggcagggcttgccgccccgacgttggctgcgagccctgggccttcacccgaacttgggggttggggtggggaaaaggaagaaacgcgggcgtattggtcccaatggggtctcggtggggtatcgacagagtgccagccctgggaccgaaccccgcgtttatgaacaaacgacccaacacccgtgcgttttattctgtctttttattgccgtcatagcgcgggttccttccggtattgtctccttccgtgtttcagttagcctcccccatctcccggtaccgcatgctatgcatcagctgctagcaccatggctcgagatcccgggtgatcaagtcttcgtcgagtgattgtaaataaaatgtaatttacagtatagtattttaattaatatacaaatgatttgataataattcttatttaactataatatattgtgttgggttgaattaaaggtccgtatactagtatcgattcgcgacctactccggaatattaatagatcatggagataattaaaatgataaccatctcgcaaataaataagtattttactgttttcgtaacagttttgtaataaaaaaacctataaatattccggattattcataccgtcccaccatcgggcgcggatccgccaccatggaaaactggtccgctctggaactgctgcccaaggtcggaatccctaccgacttcctgacccacgtcaagacctccgctggcgaggaaatgttcgaggctctgaggatctactacggcgacgaccccgagcgttacaacatccacttcgaggctatcttcggcaccttctgcaaccgtctggaatgggtgtacttcctgacttccggcctggctgctgctgctcacgctatcaagttccacgacctgaacaagctgaccaccggcaagatgctgttccacgtgcaagtgccccgtgtggcttccggtgctggcctgcctacctcccgtcagaccaccatcatggtcaccaagtactccgagaagtcccccatcaccatccctttcgagctgtccgctgcttgcctgacttacctgcgtgaaaccttcgagggcaccatcctggacaagatcctgaacgtcgaggctatgcacaccgtgctgcgtgctctgaagaacaccgctgacgctatggaacgtggcctgatccacagcttcctccagaccctgctgaggaaggctcccccctacttcgtggtgcagaccctggtcgagaacgctaccctggctcgtcaggctctgaaccgtatccagcgctccaacatcctgcagtccttcaaggctaagatgctggctaccctgttcctgctgaaccgtacccgtgaccgtgactacgtgctgaagttcctgacccgtctggctgaggctgctaccgactccatcctcgacaaccctactacctacaccacctcctccggtgctaagatctccggtgtcatggtgtccaccgctaacgtgatgcagatcatcatgtccctgctgtcctcccacatcactaaggaaaccgtgtccgctcccgctacctacggcaacttcgtgctgtcccccgagaacgctgtgaccgctatctcctaccactctatcctggctgacttcaactcctacaaggctcacctgacctccggccagccccacctccccaacgactccctgagccaggctggtgctcactccctgacccccctgtccatggacgtgatccgtctgggcgaaaagaccgtgatcatggaaaacctgcgtcgcgtgtacaagaacaccgacaccaaggaccccctggaacgtaacgtggacctgaccttcttcttccccgtgggcctgtacctgcccgaggaccgtggttacaccaccgtcgagtccaaggtcaagctgaacgacaccgtgcgtaacgctctgcccaccaccgcttacctgctgaacagggaccgtgctgtgcaaaagatcgacttcgtggacgctctcaagaccctgtgccaccccgtgctgcacgagcctgctccatgcctgcaggctttcaccgagcgtggtcccccatccgagcccgctatgcagcgtctgctggaatgccgtttccagcaagagcccatgggtggtgctgctcgtcgtatcccccacttctaccgtgtgcgccgcgaggtgccccgtaccgtgaacgagatgaagcaggacttcgtggtcaccgacttctacaaggttggaaacatcaccctgtacaccgagctgcaccctttcttcgacttcacccactgccaagagaactccgagactgtggctctgtgcaccccccgtatcgtgatcggcaacctgcccgacggcctggctcccggtcccttccacgagctgaggacctgggagatcatggaacacatgcgcctgcgtcccccacccgactacgaggaaaccctgcgtctgttcaagaccaccgtgacctcccccaactaccccgagctgtgctacctggtggacgtgctggtgcacggcaacgctgacgctttcctgctgatccgcgctttcatcgctcgttgcatcgtgaacatgttccacacccgtcagctgctggtgttcgctcactcctacgctctggtcaccctgatcgctgagcacctggctgacggtgctctgcccccccagctcctgttccactaccgtaacctggtggctgtgctgcgcctggtcacccgtatctccgctctgcccggcctgaacaacggccagctggctgaggaacccctgtccgcttacgtgaacgctctgcacgaccacaggctgtggccccccttcgtgacccacctccctcgtaacatggaaggtgtccaggtggtggctgatcgtcagcccctgaaccccgctaacatcgaggctcgtcaccacggtgtctccgacgtgccccgtctgggtgctatggacgctgacgagcccctgttcgtggacgactaccgtgctaccgacgacgagtggaccctgcaaaaggtgttctacctgtgcctgatccccgctatgaccaacaaccgtgcttgcggcctgggcctgaacctcaagactctgctggtggacctgttctaccgtcccgccttcctgctcatgcccgctgctaccgctgtgtccacctccggcaccacctccaaggaatccacctctggtgtcacccccgaggactccgtggctgctcagcgtcaggctgtgggcgagatgctgaccgagctggtcgaggacgtggccaccgacgctcacacccctctgctgcaggcttgccgcgagctgttcctggctgtgcagttcgtgggcgagcacgtgaaggtgctggaagtgcgtgctcccctggaccacgctcagaggcagggactgcccgacttcatctcccgtcagcatgtgctgtacaacggttgctgcgtcgtgaccgctcctaagaccctgatcgagtactccctgcccgtgcccttccaccgtttctactccaaccccaccatctgcgctgctctgtccgacgacatcaagcgttacgtgaccgagttcccccactaccatagacacgatggtggtttccccctgcccaccgctttcgctcacgagtaccacaactggctgcgtagccccttctcccgttactccgctacctgccccaacgtgctgcactccgtgatgaccctggctgctatgctgtacaagatctcccccgtgtccctggtgctgcagaccaaggctcacatccaccccggtttcgctctgaccgctgtgcgtaccgacaccttcgaggtggacatgctgctgtactccggcaagtcctgcacctccgtcatcatcaacaaccccatcgtgaccaaggaagagagggacatctccaccacctaccacgtgacccagaacatcaacaccgtggacatgggcctgggttacacctccaacacttgcgtggcctacgtgaaccgcgtccgcaccgacatgggtgtccgtgtgcaggacctgttccgtgtgttccccatgaacgtgtaccgccacgatgaggtggaccgttggatcaggcacgctgctggcgtcgagcgtccccagctgctggacaccgagactatctccatgctgaccttcggttccatgtccgagcgcaacgctgctgctaccgtgcacggccagaaggctgtctgcgagctgatcctgacccctgtgactatggacgtgaactacttcaagatcaccaacaaccctcgtggtcgtgcttcctgcatgctgggcgtggacccctacgacaccgaggctgccaccaaggctatctacgaccaccgcgaggctgacgctcagaccttcgctgctacccacaacccatgggcttcccaggctggttgcctgtccgacgtcctgtacaacacccgtcaccgcgagcgtctgggctacaactccaagttctactccccctgcgctcagtacttcaacaccgaggaaatcatcgctgccaacaagaccctcttcaagaccatcgacgagtacctgctgcgcgctaaggactgcatccgtggcgacaccgacactcagtacgtgtgcgtcgagggaaccgagcagctgatcgagaacccttgccgtctgacccaagaggctctgcccatcctgtccaccaccaccctggctctgatggaaactaagctgaagggtggcgctggtgctttcgctacctccgagactcacttcggcaactacgtcgtgggagagatcatccccctgcagcagtccatgctgttcaacagctaagagctcaagcttgtcgagaagtactagaggatcataatcagccataccacatttgtagaggttttacttgctttaaaaaacctcccacacctccccctgaacctgaaacataaaatgaatgcaattgttgttgttaacttgtttattgcagcttataatggttacaaataaagcaatagcatcacaaatttcacaaataaagcatttttttcactgcattctagttgtggtttgtccaaactcatcaatgtatcttatcatgtctggatctgatcactgcttgagcctagaagatccggctgctaacaaagcccgaaaggaagctgagttggctgctgtggctagctttgtttaactttaagaaggagatacatctagaaatattaatagatcatggagataattaaaatgataaccatctcgcaaataaataagtattttactgttttcgtaacagttttgtaataaaaaaacctataaatattccggattattcataccgtcccaccatcgggcgcggatcccggtccgaagcgcgcggaattcgccaccatgaccatggacgagcagcagccccaggctgtgacccccgtgtacgtgggcggtttcctggctcgttacgaccagtcccccgacgaggctgagctgctgctgccacgtgacgtggtcgaacactggctgcacgctcagggccagggacagccttccctgtccgtggctctgcccctgaacatcaaccacgacgacaccgctgtcgtgggtcacgtggccgctatgcagtccgtgcgtgacggcctgttctgcctgggttgcgtgacctccccccgtttcctggaaatcgtgcgtcgtgcttccgagaagtccgagctggtgtcccgtggtcccgtgtccccactgcagcccgacaaggtggtcgagttcctgtccggttcctacgctggcctgtccctgtcatcccgtcgttgcgacgacgtcgaggctgctacctccctgagcggctccgagactacccccttcaagcacgtggccctgtgctccgtgggtcgtaggcgtggaaccctggctgtgtacggtcgtgaccccgagtgggtcacccagcgtttccccgacctgaccgctgctgaccgtgacggactgcgtgctcagtggcagcgttgcggttccaccgctgtggacgcttccggcgaccccttccgttccgactcctacggcctgctgggcaactccgtggacgctctgtacatccgcgagcgtctgcccaagctgcgttacgacaagcagctcgtgggtgtcaccgagcgcgagtcctacgtgaaggcttccgtgtcccccgaggctgcttgcgacatcaaggctgcttccgctgagcgttctggcgacagccgctcccaggctgctactcctgctgctggtgctcgtgtgccctccagctccccatccccacctgtcgagcctccctcccccgtgcaacctcctgctctgcctgcttccccctccgtgctgcctgctgagtccagcccctccctgtcaccctctgagcctgctgaggctgcctccatgtcccaccctctgagcgctgctgtgactgctgctaccgctccccctggtgctactgtggctggtgcttcccccgctgtgccttccctggcttggcctcacgacggtgtctacctgcccaaggacgctttcttctccctgctgggcgcttcccgttccgctgctcccgtgatgtaccccggtgctgtggctgctccccccagcgcttcacctgctcctctgcccctgccctcctaccccgcttcctacggtgctcccgtcgtgggttacgaccagctggctgctcgtcacttcgctgactacgtggacccccactaccccggctggggtcgtcgttacgagcccgctccttccctgcacccatcctaccctgtgccccctcctccatcacccgcttactaccgtcgtcgtgactcccccggtggcatggacgagcctccatctggatgggagcgttacgacggttcccaccgtggccagtcccaaaagcagcaccgtcacggtggttccggtggtcacaacaagcgtcgcaaggaagccgctgctgcatcctccagctccgacgaggacctgagcttccccggcgaggctgaacacggtcgtgctcgcaagcgtctgaagtcccacgtgaactccgacggaggtagcggaggccacgctggttccaaccagcagcagcaacagcgctacgacgagctgcgtgacgctatccacgagctgaagcgtgacctgttcgctgctcgccagtcctccaccctgctgtctgctgctctgccagctgccgcttcttcctcccctaccaccaccaccgtgtgcacccctactggcgagctgacctctggtggtggcgagactcccaccgctctgctgtccggtggtgctaaggtggccgagcgtgctcaggctggtgtcgtgaacgcttcctgccgtctggctaccgcttccggttccgaggctgccaccgctggtccctctaccgctggttcctcatcctgcccagcttccgtggtgctggctgccgctgctgctcaagccgccgctgcttcacagtcccccccaaaggatatggtggacctgaaccgtcgtatcttcgtggctgctctgaacaagctcgagtaataaaagcttgtcgagaagtactagaggatcataatcagccataccacatttgtagaggttttacttgctttaaaaaacctcccacacctccccctgaacctgaaacataaaatgaatgcaattgttgttgttaacttgtttattgcagcttataatggttacaaataaagcaatagcatcacaaatttcacaaataaagcatttttttcactgcattctagttgtggtttgtccaaactcatcaatgtatcttatcatgtctggatctgatcactgcttgagcctagaagatccggctgctaacaaagcccgaaaggaagctgagttggctgctgccaccgctgagcaataactatcataacccctaggggcctctaaacgggtcttgaggggttttttgctgaaaggaggaactatatccggatctgaacaggagggacagctgatagaaacagaagccactggagcacctcaaaaacaccatcatacactaaatcagtaagttggcagcatcacccgacgcactttgcgccgaataaatacctgtgacggaagatcacttcgcagaataaataaatcctggtgtccctgttgataccgggaagccctgggccaacttttggcgaaaatgagacgttgatcggcacgtaagaggttccaactttcaccataatgaaataagatcactaccgggcgtattttttgagttatcgagattttcaggagctaaggaagctaaaatggagaaaaaaatcactggatataccaccgttgatatatcccaatggcatcgtaaagaacattttgaggcatttcagtcagttgctcaatgtacctataaccagaccgttcagctggatattacggcctttttaaagaccgtaaagaaaaataagcacaagttttatccggcctttattcacattcttgcccgcctgatgaatgctcatccggaattccgtatggcaatgaaagacggtgagctggtgatatgggatagtgttcacccttgttacaccgttttccatgagcaaactgaaacgttttcatcgctctggagtgaataccacgacgatttccggcagtttctacacatatattcgcaagatgtggcgtgttacggtgaaaacctggcctatttccctaaagggtttattgagaatatgtttttcgtctcagccaatccctgggtgagtttcaccagttttgatttaaacgtggccaatatggacaacttcttcgcccccgttttcaccatgggcaaatattatacgcaaggcgacaaggtgctgatgccgctggcgattcaggttcatcatgccgtttgtgatggcttccatgtcggcagaatgcttaatgaattacaacagtactgcgatgagtggcagggcggggcgtaatttttttaaggcagttattggtgcccttaaacgcctggttgctacgcctgaataagtgataataagcggatgaatggcagaaattcgaaagcaaattcgacccggtcgtcggttcagggcagggtcgttaaatagccgcttatgtctattgctggtttaccggtttattgactaccggaagcagtgtgaccgtgtgcttctcaaatgcctgaggccagtttgctcaggctctccccgtggaggtaataattgacgatatgatcatttattctgcctcccagctgacattcatccggggtcagcaccgtttctgcggactggctttctacgtgttccgcttcctttagcagcccttgcgccctgagtgcttgcggcagcgtgaagctaattctgtcagccgttaagtgttcctgtgtcactcaaaattgctttgagaggctctaagggcttctcagtgcgttacatccctggcttgttgtccacaaccgttaaaccttaaaagctttaaaagccttatatattcttttttttcttataaaacttaaaaccttagaggctatttaagttgctgatttatattaattttattgttcaaacatgagagcttagtacgtgaaacatgagagcttagtacgttagccatgagagcttagtacgttagccatgagggtttagttcgttaaacatgagagcttagtacgttaaacatgagagcttagtacgtgaaacatgagagcttagtacgtactatcaacaggttgaactgctgatcaacagatcctctacgcggccgcggtaccataacttcgtatagcatacattatacgaagttatctggtttaaacgtacccgtagtggctatggcagggcttgccgccccgacgttggctgcgagccctgggccttcacccgaacttgggggttggggtggggaaaaggaagaaacgcgggcgtattggtcccaatggggtctcggtggggtatcgacagagtgccagccctgggaccgaaccccgcgtttatgaacaaacgacccaacacccgtgcgttttattctgtctttttattgccgtcatagcgcgggttccttccggtattgtctccttccgtgtttcagttagcctcccccatctcccggtaccgcatgctatgcatcagctgctagcttagcgagcgtccacagcctggggaccgtaacgggagtgagcgggcaggttcacacgggtctgcttcagctcagggggcaggccagcgtagtacttgtccaggtgacgcagcaggggggggtccagctggtgacgcaggcagaattccttcacagcgttgtacaggccgtagaacagggtgataccctcgggagcagcagcggtggacacgggcagacgcacagcacggttggtacgggtagcctcgttacggatagccaccaccacgttgaacagggaggggggcaccagctcgaaacccagcacgtgttcggtgaagatggaacgaccgtaggacagacgagtcaggtcgtaaccacggcacaggtcgtccacgcaagtgtacacagcgggggaaccgtcgccgcactcggagtaaccgcgcatcacggtcatccaacggggagcggtgtcggaggacagcagggtcagcagagcacgcagctggtcggggttgttgtacagcagggccagggtgtccaggaaagcgtcgtccagcagcacggagttagcagcctcgggggtcacgggacggtaacggatcagctgggacaggggaccgtccctacgggtcacgttgaccaggggacgcagccaggactcgtacttgtcgccctggaacacctctcccagcaggcaacgacgggtcagctcggggcactcagcgggcaccttctcagccacggtgggagccacggacacggtagcggaggacacgatgggcagcagcaggcagcaccacagcagagccacgggaccgggggagaaggagaaaccgcagtcgggacgacggcacatggtggctcgagatcccgggtgatcaagtcttcgtcgagtgattgtaaataaaatgtaatttacagtatagtattttaattaatatacaaatgatttgataataattcttatttaactataatatattgtgttgggttgaattaaaggtccgtatactagtatcgattcgcgacctactccggaatattaatagatcatggagataattaaaatgataaccatctcgcaaataaataagtattttactgttttcgtaacagttttgtaataaaaaaacctataaatattccggattattcataccgtcccaccatcgggcgcggatccgccaccatgtcccccaagaacctgacccccttcctgaccgctctgtggctgctgctgggccactcccgtgtgcctcgtgtgcgtgctgaggaatgctgcgagttcatcaacgtgaaccacccccccgagcgctgctacgacttcaagatgtgcaaccgtttcaccgtggctctgcgttgccccgacggcgaagtgtgctactcccccgaaaagaccgctgagatccgtggtatcgtgaccaccatgacccactccctgacccgtcaggtggtgcacaacaagctgacctcttgcaactacaaccccctgtacctcgaggctgacggtcgtatccgttgcggcaaggtcaacgacaaggctcagtacctgctgggtgctgctggttccgtgccctaccgttggatcaacctcgagtacgacaagatcacccgtatcgtgggcctggaccagtacctcgagtccgtgaagaagcacaagcgtctggacgtgtgccgtgctaagatgggttacatgctgcagtaaaagcttgtcgagaagtactagaggatcataatcagccataccacatttgtagaggttttacttgctttaaaaaacctcccacacctccccctgaacctgaaacataaaatgaatgcaattgttgttgttaacttgtttattgcagcttataatggttacaaataaagcaatagcatcacaaatttcacaaataaagcatttttttcactgcattctagttgtggtttgtccaaactcatcaatgtatcttatcatgtctggatctgatcactgcttgagcctagaagatccggctgctaacaaagcccgaaaggaagctgagttggctgctgtggctagctttgtttaactttaagaaggagatacatctagaccggaatattaatagatcatggagataattaaaatgataaccatctcgcaaataaataagtattttactgttttcgtaacagttttgtaataaaaaaacctataaatattccggattattcataccgtcccaccatcgggcgcggatccgccaccatgctgcgtctgctgctgcgtcaccacttccactgcctgctgctgtgcgctgtgtgggctaccccctgcctggcttccccttggtccaccctgaccgctaaccagaacccctccccaccctggtccaagctgacctactccaagccccacgacgctgctaccttctactgccccttcctgtacccatccccccctcgttccccactgcagttctccggtttccagcgtgtgctgaccggtcccgagtgccgtaacgagactctgtacctgctgtacaaccgcgagggccagaccctggtcgagaggtcctccacctgggtcaagaaggtcatctggtacttgtccggtcgtaaccagaccatcctgcagcgtatgccccgtaccgcttccaagccctccgacggcaacgtgcagatctccgtcgaggacgctaagatcttcggtgctcacatggtgcccaagcagaccaagctgctgcgtttcgtggtcaacgacggcacccgttaccagatgtgcgtgatgaagctcgagtcctgggctcacgtgttccgtgactactccgtgtccttccaagtgcgcctgaccttcaccgaggctaacaaccagacctacaccttctgcacccaccccaacctgatcgtgtaaaagcttgtcgagaagtactagaggatcataatcagccataccacatttgtagaggttttacttgctttaaaaaacctcccacacctccccctgaacctgaaacataaaatgaatgcaattgttgttgttaacttgtttattgcagcttataatggttacaaataaagcaatagcatcacaaatttcacaaataaagcatttttttcactgcattctagttgtggtttgtccaaactcatcaatgtatcttatcatgtctggatctgatcactgcttgagcctagaagatccggctgctaacaaagcccgaaaggaagctgagttggctgctgggtgcctaatgagtgagctaactcacattaattgcccggaatattaatagatcatggagataattaaaatgataaccatctcgcaaataaataagtattttactgttttcgtaacagttttgtaataaaaaaacctataaatattccggattattcataccgtcccaccatcgggcgcggatccgccaccatgcgtctgtgccgtgtgtggctgtccgtgtgcctgtgcgctgtggtgctgggccagtgccagcgtgaaaccgctgagaagaacgactactaccgtgtgccccactactgggacgcttgctcccgtgctctgcccgaccagacccgttacaagtacgtcgagcagctggtggacctgaccctgaactaccactacgacgcttcccacggcctggacaacttcgacgtgctgaagcgtatcaacgtgaccgaggtgtccctgctgatctccgacttccgtcgtcagaaccgtcgtggtggcaccaacaagcgtaccaccttcaacgctgctggttccctggctccccacgctcgttccctcgagttctccgtgcgtctgttcgctaactaaaagcttgtcgagaagtactagaggatcataatcagccataccacatttgtagaggttttacttgctttaaaaaacctcccacacctccccctgaacctgaaacataaaatgaatgcaattgttgttgttaacttgtttattgcagcttataatggttacaaataaagcaatagcatcacaaatttcacaaataaagcatttttttcactgcattctagttgtggtttgtccaaactcatcaatgtatcttatcatgtctggatctgatcactgcttgagcctagaagatccggctgctaacaaagcccgaaaggaagctgagttggctgctgccaccgctgagcaataactatcataacccccggaatattaatagatcatggagataattaaaatgataaccatctcgcaaataaataagtattttactgttttcgtaacagttttgtaataaaaaaacctataaatattccggattattcataccgtcccaccatcgggcgcggatcccggtccgaagcgcgcggaattcaaaggcctaccgtcgacgccaccatggaatcccgtatctggtgcctggtcgtgtgcgtgaacctgtgcatcgtgtgcctgggtgctgctgtgtcctcctcctccacccgtggcacctccgctacccactcccaccactcctcccacaccacctccgccgctcactcccgttccggttccgtgtcccagcgtgtgacctcctcccagaccgtgtcccacggtgtcaacgagactatctacaacaccaccctgaagtacggcgacgtcgtgggtgtcaacaccaccaagtacccctaccgtgtgtgctccatggctcagggcaccgacctgatccgtttcgagcgtaacatcgtgtgcacctccatgaagcccatcaacgaggacctggacgagggtatcatggtggtgtacaagcgcaacatcgtggctcacaccttcaaggtccgcgtgtaccagaaggtgctgaccttccgtcgttcctacgcttacatccacaccacttacctgctgggttccaacaccgagtacgtggcccctcccatgtgggagatccaccacatcaactcccactcccagtgctactcctcttactcccgtgtgatcgctggcaccgtgttcgtggcttaccaccgtgactcctacgagaacaagaccatgcagctgatgcccgacgactactccaacacccactccacccgttacgtgaccgtgaaggaccagtggcactcccgtggttccacctggctgtaccgtgaaacctgcaacctgaactgcatggtcaccatcaccaccgctcgttccaagtacccttaccacttcttcgctacctccaccggcgacgtggtggacatctcccccttctacaacggtactaaccgtaacgcttcctacttcggcgagaacgctgacaagttcttcatcttccccaactacaccatcgtgtccgacttcggtcgtcccaactccgctctggaaacccaccgtctggtggctttcttggagcgtgctgactccgtgatctcctgggacatccaggacgagaagaacgtgacctgccagctgaccttctgggaggcttccgagcgtaccatccgttccgaggctgaggactcctaccacttctccagcgctaagatgaccgctaccttcctgtccaagaaacaagaggtcaacatgtccgactccgccctggactgcgtgcgtgacgaggctatcaacaagctgcagcagatcttcaacacctcctacaaccagacctacgagaagtacggaaacgtgtccgtgttcgagactaccggtggcctggtggtgttctggcagggtatcaagcagaagtccctggtcgagctggaacgtctggctaaccgttcctccctgaacctgacccacaaccgtaccaagcgttccaccgacggcaacaacgctactcacctgtccaacatggaatccgtgcacaacctggtgtacgctcagctgcagttcacctacgacaccctgcgcggttacatcaaccgtgctctggctcagatcgctgaggcttggtgcgtggaccagcgtcgtaccctggaagtgttcaaggaactgtccaagatcaacccctccgctatcctgtccgccatctacaacaagcctatcgctgctcgtttcatgggcgacgtgctgggcctggcttcctgcgtgaccatcaaccagacttccgtgaaggtgctgcgtgacatgaacgtgaaggaatcccccggtcgttgctactcccgtcccgtggtcatcttcaacttcgctaactcctcctacgtgcagtacggccagctgggcgaggacaacgagatcctgctgggcaaccaccgtaccgaggaatgccagctgccctccctgaagatcttcatcgctggcaactccgcttacgaatacgtggactacctgttcaagcgcatgatcgacctgtcctccatctctaccgtggactccatgatcgctctggacatcgaccccctggaaaacaccgacttccgtgtgctggaactgtactcccagaaggaactgcgttccatcaacgtgttcgacctggaagagatcatgcgcgagttcaactcctacaagcagcgtgttaagtacgtcgaggacaaggtggtggaccccctgcccccctacctgaagggactggacgacctgatgtccggcctgggagctgccggcaaggctgtgggtgtcgctatcggtgctgtgggtggtgctgtggcttccgtggtcgagggtgtcgccaccttcctgaagaaccccttcggtgctttcaccatcatcctggtggctatcgctgtggtcatcatcatctacctgatctacacccgtcagcgtcgtctgtgcatgcagcccctgcagaacctgttcccctacctggtgtccgctgacggtactaccgtgacctccggcaacaccaaggacacctccctgcaggctcccccatcctacgaggaatccgtctacaactccggtcgcaagggtcccggtcccccttcctccgacgcttctaccgctgctcccccatacaccaacgagcaggcttaccagatgctgctggctctcgtgcgtctggacgctgagcagcgtgcacagcagaacggcaccgactccctggacggccagaccggaacccaggacaagggccagaagcccaacctgctggaccgtctgcgtcaccgcaagaacggttaccgtcacctgaaggactccgacgaggaagagaacgtctaaggcgcgccaagcttgtcgagaagtactagagatcataatcagccataccacatttgtagaggttttacttgctttaaaaaacctcccacacctccccctgaacctgaaacataaaatgaatgcaattgttgttgttaacttgtttattgcagcttataatggttacaaataaagcaatagcatcacaaatttcacaaataaagcatttttttcactgcattctagttgtggtttgtccaaactcatcaatgtatcttatcatgtctggatctgatcactgcttgagcctagaagatccggctgctaacaaagcccgaaaggaagctgggaatattaatagatcatggagataattaaaatgataaccatctcgcaaataaataagtattttactgttttcgtaacagttttgtaataaaaaaacctataaatattccggattattcataccgtcccaccatcgggcgcggatccgccaccatgcgtcccggcctgccctcctacctgatcgtgctggctgtgtgcctgctgtcccacctcctgtcctcccgttacggtgctgaggctatctccgagcccctggacaaggctttccacctcctgctgaacacctacggtcgtcctatccgtttcctgcgcgagaacaccacccagtgcacctacaactcctccctgcgcaactccaccgtcgtccgcgagaacgctatctccttcaacttcttccagtcctacaaccagtactacgtgttccacatgccccgttgcctgttcgctggtcccctggctgagcagttcctgaaccaggtggacctgaccgagactctcgagcgttaccagcagcgtctgaacacttacgctctggtgtccaaggacctggcttcctaccgttccttcagccagcagctgaaggctcaggactccctgggcgagcagcccaccactgtgcctccccctatcgacctgtccatcccccacgtgtggatgcccccccagaccactcctcacggctggaccgagtcccacaccacctccggactgcaccgtccccacttcaaccagacctgcatcctgttcgacggtcacgacctgctgttctccaccgtgaccccctgcctgcaccagggcttctacctcatcgacgagctgcgttacgtgaagatcaccctgaccgaggatttcttcgtggtcaccgtgtccatcgacgacgacacccccatgctgctgatcttcggtcacctcccccgtgtgctgttcaaggctccctaccagcgtgacaacttcatcctgcgtcagaccgagaagcacgagctgctggtgctggtcaagaaggaccagctgaaccgtcactcttacctgaaggaccccgacttcctggacgctgctctggacttcaactacctggacctgtccgctctgctgaggaactccttccaccgttacgctgtggacgtgctgaagtccggtcgttgccagatgctggaccgtcgtaccgtcgagatggctttcgcttacgccctggctctgttcgctgctgctcgtcaagaagaggctggcgctcaggtgtccgtgccccgtgctctggaccgtcaggctgctctgctgcagatccaagagttcatgatcacttgcctgtcccagaccccccctcgtaccaccctgctgctgtaccccaccgctgtggacctggctaagcgtgctctgtggacccccaaccagatcaccgacatcacctccctcgtgcgtctggtgtacatcctgtccaagcagaaccagcagcacctgatcccccagtgggctctgcgtcagatcgctgacttcgctctgaagctgcacaagacccacctggcttcattcctcagcgctttcgctcgccaagagctgtacctgatgggttccctggtgcactccatgctggtgcacaccaccgagcgtcgcgagatcttcatcgtggaaaccggcctgtgctccctggccgagctgtcccacttcacccagctgctggctcacccccaccacgagtacctgtccgacctgtacaccccctgctcctcttccggtcgtcgtgaccactccctggaacgtctgacccgtctgttccccgacgctaccgtgcctaccaccgtgcctgctgctctgtccatcctgtctaccatgcagccctccaccctggaaaccttccccgacctgttctgcctgcctctgggcgagtccttctccgctctgaccgtgtccgagcacgtgtcctacgtggtcaccaaccagtacctgatcaagggcatctcctaccccgtgtccaccaccgtcgtgggccagtccctgatcatcacccagaccgactcccagaccaagtgcgagctgacccgtaacatgcacaccactcactccatcaccgctgctctgaacatctccctcgagaactgcgctttctgccagtccgctctgttggagtacgacgacactcagggtgtcatcaacatcatgtacatgcacgactccgacgacgtgctgttcgctctggacccctacaacgaggtggtggtgtcctccccccgtacccactacctgatgctgctgaagaacggcaccgtgctggaagtgaccgacgtggtggtggacgctaccgaccgtctgctgatgatgtccgtgtacgctctgtccgctatcatcggcatctacctgctgtaccgtatgctgaagacctgctaaggcgccaagctttgtcgagaagtactagaggatcataatcagccataccacatttgtagaggttttacttgctttaaaaaacctcccacacctccccctgaacctgaaacataaaatgaatgcaattgttgttgttaacttgtttattgcagcttataatggttacaaataaagcaatagcatcacaaatttcacaaataaagcatttttttcactgcattctagttgtggtttgtccaaactcatcaatgtatcttatcatgtctggatctgatcactgcttgagcctagaagatccggctgctaacaaagcccgaaaggaagctgagttggctgctgccaccgctgagcaataactatcataacccctaggagatccgaaccagataagtgaaatctagttccaaactattttgtcatttttaattttcgtattagcttacgacgctacacccagttcccatctattttgtcactcttccctaaataatccttaaaaactccatttccacccctcccagttcccaactattttgtccgcccaca

SEQ ID NO: 40 - DNA, 22348 bp, Artificial Sequence
  Synthetic construct
ttgttccagtttggaacaagagtccactattaaagaacgtggactccaacgtcaaagggcgaaaaaccgtctatcagggcgatggcccactacgtgaaccatcaccctaatcaagttttttggggtcgaggtgccgtaaagcactaaatcggaaccctaaagggagcccccgatttagagcttgacggggaaagccggcgaacgtggcgagaaaggaagggaagaaagcgaaaggagcgggcgctagggcgctggcaagtgtagcggtcacgctgcgcgtaaccaccacacccgccgcgcttaatgcgccgctacagggcgcgtccattcgccattcaggctgcgcaactgttgggaagggcgatcggtgcgggcctcttcgctattacgccagctggcgaaagggggatgtgctgcaaggcgattaagttgggtaacgccagggttttcccagtcacgacgttgtaaaacgacggccagtgcatagaccagccgcgtaacctggcaaaatcggttacggttgagtaataaatggatgccctgcgtaagcgggtgtgggcggacaataaagtcttaaactgaacaaaatagatctaaactatgacaataaagtcttaaactagacagaatagttgtaaactgaaatcagtccagttatgctgtgaaaaagcatactggacttttgttatggctaaagcaaactcttcattttctgaagtgcaaattgcccgtcgtattaaagaggggcgtggccaagggcatggtaaagactatattcgcggcgttgtgacaatttaccgaacaactccgcggccgggaagccgatctcggcttgaacgaattgttaggtggcggtacttgggtcgatatcaaagtgcatcacttcttcccgtatgcccaactttgtatagagagccactgcgggatcgtcaccgtaatctgcttgcacgtagatcacataagcaccaagcgcgttggcctcatgcttgaggagattgatgagcgcggtggcaatgccctgcctccggtgctcgccggagactgcgagatcatagatatagatctcactacgcggctgctcaaacttgggcagaacgtaagccgcgagagcgccaacaaccgcttcttggtcgaaggcagcaagcgcgatgaatgtcttactacggagcaagttcccgaggtaatcggagtccggctgatgttgggagtaggtggctacgtctccgaactcacgaccgaaaagatcaagagcagcccgcatggatttgacttggtcagggccgagcctacatgtgcgaatgatgcccatacttgagccacctaactttgttttagggcgactgccctgctgcgtaacatcgttgctgctgcgtaacatcgttgctgctccataacatcaaacatcgacccacggcgtaacgcgcttgctgcttggatgcccgaggcatagactgtacaaaaaaacagtcataacaagccatgaaaaccgccactgcgccgttaccaccgctgcgttcggtcaaggttctggaccagttgcgtgagcgcatacgctacttgcattacagtttacgaaccgaacaggcttatgtcaactgggtttgtgccttcatccgtttccacggtgtgcgtcacccggcaaccttgggcagcagcgaagtcgaggcatttctgtcctggctggcgaacgagcgcaaggtttcggtctccacgcatcgtcaggcattggcggccttgctgttcttctacggcaaggtgctgtgcacggatctgcccttgcttcaggagatcggtagacctcggccgtcgcggcgcttgccggtggtgctgaccccggatgaagtggttcgcatcctcggttttctggaaggcgagcatcgtttgttcgcccaggactctagctatagttctagtggttggctacagctttgtttgtactatcaacaggttgaactgctgatcaacagatcctctacgcggccgcggtaccataacttcgtatagcatacattatacgaagttatctggtttaaacgtacccgtagtggctatggcagggcttgccgccccgacgttggctgcgagccctgggccttcacccgaacttgggggttggggtggggaaaaggaagaaacgcgggcgtattggtcccaatggggtctcggtggggtatcgacagagtgccagccctgggaccgaaccccgcgtttatgaacaaacgacccaacacccgtgcgttttattctgtctttttattgccgtcatagcgcgggttccttccggtattgtctccttccgtgtttcagttagcctcccccatctcccggtaccgcatgctatgcatcagctgctagcaccatggctcgagatcccgggtgatcaagtcttcgtcgagtgattgtaaataaaatgtaatttacagtatagtattttaattaatatacaaatgatttgataataattcttatttaactataatatattgtgttgggttgaattaaaggtccgtatactagtatcgattcgcgacctactccggaatattaatagatcatggagataattaaaatgataaccatctcgcaaataaataagtattttactgttttcgtaacagttttgtaataaaaaaacctataaatattccggattattcataccgtcccaccatcgggcgcggatccgccaccatggaaaactggtccgctctggaactgctgcccaaggtcggaatccctaccgacttcctgacccacgtcaagacctccgctggcgaggaaatgttcgaggctctgaggatctactacggcgacgaccccgagcgttacaacatccacttcgaggctatcttcggcaccttctgcaaccgtctggaatgggtgtacttcctgacttccggcctggctgctgctgctcacgctatcaagttccacgacctgaacaagctgaccaccggcaagatgctgttccacgtgcaagtgccccgtgtggcttccggtgctggcctgcctacctcccgtcagaccaccatcatggtcaccaagtactccgagaagtcccccatcaccatccctttcgagctgtccgctgcttgcctgacttacctgcgtgaaaccttcgagggcaccatcctggacaagatcctgaacgtcgaggctatgcacaccgtgctgcgtgctctgaagaacaccgctgacgctatggaacgtggcctgatccacagcttcctccagaccctgctgaggaaggctcccccctacttcgtggtgcagaccctggtcgagaacgctaccctggctcgtcaggctctgaaccgtatccagcgctccaacatcctgcagtccttcaaggctaagatgctggctaccctgttcctgctgaaccgtacccgtgaccgtgactacgtgctgaagttcctgacccgtctggctgaggctgctaccgactccatcctcgacaaccctactacctacaccacctcctccggtgctaagatctccggtgtcatggtgtccaccgctaacgtgatgcagatcatcatgtccctgctgtcctcccacatcactaaggaaaccgtgtccgctcccgctacctacggcaacttcgtgctgtcccccgagaacgctgtgaccgctatctcctaccactctatcctggctgacttcaactcctacaaggctcacctgacctccggccagccccacctccccaacgactccctgagccaggctggtgctcactccctgacccccctgtccatggacgtgatccgtctgggcgaaaagaccgtgatcatggaaaacctgcgtcgcgtgtacaagaacaccgacaccaaggaccccctggaacgtaacgtggacctgaccttcttcttccccgtgggcctgtacctgcccgaggaccgtggttacaccaccgtcgagtccaaggtcaagctgaacgacaccgtgcgtaacgctctgcccaccaccgcttacctgctgaacagggaccgtgctgtgcaaaagatcgacttcgtggacgctctcaagaccctgtgccaccccgtgctgcacgagcctgctccatgcctgcaggctttcaccgagcgtggtcccccatccgagcccgctatgcagcgtctgctggaatgccgtttccagcaagagcccatgggtggtgctgctcgtcgtatcccccacttctaccgtgtgcgccgcgaggtgccccgtaccgtgaacgagatgaagcaggacttcgtggtcaccgacttctacaaggttggaaacatcaccctgtacaccgagctgcaccctttcttcgacttcacccactgccaagagaactccgagactgtggctctgtgcaccccccgtatcgtgatcggcaacctgcccgacggcctggctcccggtcccttccacgagctgaggacctgggagatcatggaacacatgcgcctgcgtcccccacccgactacgaggaaaccctgcgtctgttcaagaccaccgtgacctcccccaactaccccgagctgtgctacctggtggacgtgctggtgcacggcaacgctgacgctttcctgctgatccgcgctttcatcgctcgttgcatcgtgaacatgttccacacccgtcagctgctggtgttcgctcactcctacgctctggtcaccctgatcgctgagcacctggctgacggtgctctgcccccccagctcctgttccactaccgtaacctggtggctgtgctgcgcctggtcacccgtatctccgctctgcccggcctgaacaacggccagctggctgaggaacccctgtccgcttacgtgaacgctctgcacgaccacaggctgtggccccccttcgtgacccacctccctcgtaacatggaaggtgtccaggtggtggctgatcgtcagcccctgaaccccgctaacatcgaggctcgtcaccacggtgtctccgacgtgccccgtctgggtgctatggacgctgacgagcccctgttcgtggacgactaccgtgctaccgacgacgagtggaccctgcaaaaggtgttctacctgtgcctgatccccgctatgaccaacaaccgtgcttgcggcctgggcctgaacctcaagactctgctggtggacctgttctaccgtcccgccttcctgctcatgcccgctgctaccgctgtgtccacctccggcaccacctccaaggaatccacctctggtgtcacccccgaggactccgtggctgctcagcgtcaggctgtgggcgagatgctgaccgagctggtcgaggacgtggccaccgacgctcacacccctctgctgcaggcttgccgcgagctgttcctggctgtgcagttcgtgggcgagcacgtgaaggtgctggaagtgcgtgctcccctggaccacgctcagaggcagggactgcccgacttcatctcccgtcagcatgtgctgtacaacggttgctgcgtcgtgaccgctcctaagaccctgatcgagtactccctgcccgtgcccttccaccgtttctactccaaccccaccatctgcgctgctctgtccgacgacatcaagcgttacgtgaccgagttcccccactaccatagacacgatggtggtttccccctgcccaccgctttcgctcacgagtaccacaactggctgcgtagccccttctcccgttactccgctacctgccccaacgtgctgcactccgtgatgaccctggctgctatgctgtacaagatctcccccgtgtccctggtgctgcagaccaaggctcacatccaccccggtttcgctctgaccgctgtgcgtaccgacaccttcgaggtggacatgctgctgtactccggcaagtcctgcacctccgtcatcatcaacaaccccatcgtgaccaaggaagagagggacatctccaccacctaccacgtgacccagaacatcaacaccgtggacatgggcctgggttacacctccaacacttgcgtggcctacgtgaaccgcgtccgcaccgacatgggtgtccgtgtgcaggacctgttccgtgtgttccccatgaacgtgtaccgccacgatgaggtggaccgttggatcaggcacgctgctggcgtcgagcgtccccagctgctggacaccgagactatctccatgctgaccttcggttccatgtccgagcgcaacgctgctgctaccgtgcacggccagaaggctgtctgcgagctgatcctgacccctgtgactatggacgtgaactacttcaagatcaccaacaaccctcgtggtcgtgcttcctgcatgctgggcgtggacccctacgacaccgaggctgccaccaaggctatctacgaccaccgcgaggctgacgctcagaccttcgctgctacccacaacccatgggcttcccaggctggttgcctgtccgacgtcctgtacaacacccgtcaccgcgagcgtctgggctacaactccaagttctactccccctgcgctcagtacttcaacaccgaggaaatcatcgctgccaacaagaccctcttcaagaccatcgacgagtacctgctgcgcgctaaggactgcatccgtggcgacaccgacactcagtacgtgtgcgtcgagggaaccgagcagctgatcgagaacccttgccgtctgacccaagaggctctgcccatcctgtccaccaccaccctggctctgatggaaactaagctgaagggtggcgctggtgctttcgctacctccgagactcacttcggcaactacgtcgtgggagagatcatccccctgcagcagtccatgctgttcaacagctaagagctcaagcttgtcgagaagtactagaggatcataatcagccataccacatttgtagaggttttacttgctttaaaaaacctcccacacctccccctgaacctgaaacataaaatgaatgcaattgttgttgttaacttgtttattgcagcttataatggttacaaataaagcaatagcatcacaaatttcacaaataaagcatttttttcactgcattctagttgtggtttgtccaaactcatcaatgtatcttatcatgtctggatctgatcactgcttgagcctagaagatccggctgctaacaaagcccgaaaggaagctgagttggctgctgtggctagctttgtttaactttaagaaggagatacatctagaaatattaatagatcatggagataattaaaatgataaccatctcgcaaataaataagtattttactgttttcgtaacagttttgtaataaaaaaacctataaatattccggattattcataccgtcccaccatcgggcgcggatcccggtccgaagcgcgcggaattcgccaccatgaccatggacgagcagcagccccaggctgtgacccccgtgtacgtgggcggtttcctggctcgttacgaccagtcccccgacgaggctgagctgctgctgccacgtgacgtggtcgaacactggctgcacgctcagggccagggacagccttccctgtccgtggctctgcccctgaacatcaaccacgacgacaccgctgtcgtgggtcacgtggccgctatgcagtccgtgcgtgacggcctgttctgcctgggttgcgtgacctccccccgtttcctggaaatcgtgcgtcgtgcttccgagaagtccgagctggtgtcccgtggtcccgtgtccccactgcagcccgacaaggtggtcgagttcctgtccggttcctacgctggcctgtccctgtcatcccgtcgttgcgacgacgtcgaggctgctacctccctgagcggctccgagactacccccttcaagcacgtggccctgtgctccgtgggtcgtaggcgtggaaccctggctgtgtacggtcgtgaccccgagtgggtcacccagcgtttccccgacctgaccgctgctgaccgtgacggactgcgtgctcagtggcagcgttgcggttccaccgctgtggacgcttccggcgaccccttccgttccgactcctacggcctgctgggcaactccgtggacgctctgtacatccgcgagcgtctgcccaagctgcgttacgacaagcagctcgtgggtgtcaccgagcgcgagtcctacgtgaaggcttccgtgtcccccgaggctgcttgcgacatcaaggctgcttccgctgagcgttctggcgacagccgctcccaggctgctactcctgctgctggtgctcgtgtgccctccagctccccatccccacctgtcgagcctccctcccccgtgcaacctcctgctctgcctgcttccccctccgtgctgcctgctgagtccagcccctccctgtcaccctctgagcctgctgaggctgcctccatgtcccaccctctgagcgctgctgtgactgctgctaccgctccccctggtgctactgtggctggtgcttcccccgctgtgccttccctggcttggcctcacgacggtgtctacctgcccaaggacgctttcttctccctgctgggcgcttcccgttccgctgctcccgtgatgtaccccggtgctgtggctgctccccccagcgcttcacctgctcctctgcccctgccctcctaccccgcttcctacggtgctcccgtcgtgggttacgaccagctggctgctcgtcacttcgctgactacgtggacccccactaccccggctggggtcgtcgttacgagcccgctccttccctgcacccatcctaccctgtgccccctcctccatcacccgcttactaccgtcgtcgtgactcccccggtggcatggacgagcctccatctggatgggagcgttacgacggttcccaccgtggccagtcccaaaagcagcaccgtcacggtggttccggtggtcacaacaagcgtcgcaaggaagccgctgctgcatcctccagctccgacgaggacctgagcttccccggcgaggctgaacacggtcgtgctcgcaagcgtctgaagtcccacgtgaactccgacggaggtagcggaggccacgctggttccaaccagcagcagcaacagcgctacgacgagctgcgtgacgctatccacgagctgaagcgtgacctgttcgctgctcgccagtcctccaccctgctgtctgctgctctgccagctgccgcttcttcctcccctaccaccaccaccgtgtgcacccctactggcgagctgacctctggtggtggcgagactcccaccgctctgctgtccggtggtgctaaggtggccgagcgtgctcaggctggtgtcgtgaacgcttcctgccgtctggctaccgcttccggttccgaggctgccaccgctggtccctctaccgctggttcctcatcctgcccagcttccgtggtgctggctgccgctgctgctcaagccgccgctgcttcacagtcccccccaaaggatatggtggacctgaaccgtcgtatcttcgtggctgctctgaacaagctcgagtaataaaagcttgtcgagaagtactagaggatcataatcagccataccacatttgtagaggttttacttgctttaaaaaacctcccacacctccccctgaacctgaaacataaaatgaatgcaattgttgttgttaacttgtttattgcagcttataatggttacaaataaagcaatagcatcacaaatttcacaaataaagcatttttttcactgcattctagttgtggtttgtccaaactcatcaatgtatcttatcatgtctggatctgatcactgcttgagcctagaagatccggctgctaacaaagcccgaaaggaagctgagttggctgctgccaccgctgagcaataactatcataacccctaggggcctctaaacgggtcttgaggggttttttgctgaaaggaggaactatatccggatctgaacaggagggacagctgatagaaacagaagccactggagcacctcaaaaacaccatcatacactaaatcagtaagttggcagcatcacccgacgcactttgcgccgaataaatacctgtgacggaagatcacttcgcagaataaataaatcctggtgtccctgttgataccgggaagccctgggccaacttttggcgaaaatgagacgttgatcggcacgtaagaggttccaactttcaccataatgaaataagatcactaccgggcgtattttttgagttatcgagattttcaggagctaaggaagctaaaatggagaaaaaaatcactggatataccaccgttgatatatcccaatggcatcgtaaagaacattttgaggcatttcagtcagttgctcaatgtacctataaccagaccgttcagctggatattacggcctttttaaagaccgtaaagaaaaataagcacaagttttatccggcctttattcacattcttgcccgcctgatgaatgctcatccggaattccgtatggcaatgaaagacggtgagctggtgatatgggatagtgttcacccttgttacaccgttttccatgagcaaactgaaacgttttcatcgctctggagtgaataccacgacgatttccggcagtttctacacatatattcgcaagatgtggcgtgttacggtgaaaacctggcctatttccctaaagggtttattgagaatatgtttttcgtctcagccaatccctgggtgagtttcaccagttttgatttaaacgtggccaatatggacaacttcttcgcccccgttttcaccatgggcaaatattatacgcaaggcgacaaggtgctgatgccgctggcgattcaggttcatcatgccgtttgtgatggcttccatgtcggcagaatgcttaatgaattacaacagtactgcgatgagtggcagggcggggcgtaatttttttaaggcagttattggtgcccttaaacgcctggttgctacgcctgaataagtgataataagcggatgaatggcagaaattcgaaagcaaattcgacccggtcgtcggttcagggcagggtcgttaaatagccgcttatgtctattgctggtttaccggtttattgactaccggaagcagtgtgaccgtgtgcttctcaaatgcctgaggccagtttgctcaggctctccccgtggaggtaataattgacgatatgatcatttattctgcctcccagctgacattcatccggggtcagcaccgtttctgcggactggctttctacgtgttccgcttcctttagcagcccttgcgccctgagtgcttgcggcagcgtgaagctaattctgtcagccgttaagtgttcctgtgtcactcaaaattgctttgagaggctctaagggcttctcagtgcgttacatccctggcttgttgtccacaaccgttaaaccttaaaagctttaaaagccttatatattcttttttttcttataaaacttaaaaccttagaggctatttaagttgctgatttatattaattttattgttcaaacatgagagcttagtacgtgaaacatgagagcttagtacgttagccatgagagcttagtacgttagccatgagggtttagttcgttaaacatgagagcttagtacgttaaacatgagagcttagtacgtgaaacatgagagcttagtacgtactatcaacaggttgaactgctgatcaacagatcctctacgcggccgcggtaccataacttcgtatagcatacattatacgaagttatctggtttaaacgtacccgtagtggctatggcagggcttgccgccccgacgttggctgcgagccctgggccttcacccgaacttgggggttggggtggggaaaaggaagaaacgcgggcgtattggtcccaatggggtctcggtggggtatcgacagagtgccagccctgggaccgaaccccgcgtttatgaacaaacgacccaacacccgtgcgttttattctgtctttttattgccgtcatagcgcgggttccttccggtattgtctccttccgtgtttcagttagcctcccccatctcccggtaccgcatgctatgcatcagctgctagcttagcgagcgtccacagcctggggaccgtaacgggagtgagcgggcaggttcacacgggtctgcttcagctcagggggcaggccagcgtagtacttgtccaggtgacgcagcaggggggggtccagctggtgacgcaggcagaattccttcacagcgttgtacaggccgtagaacagggtgataccctcgggagcagcagcggtggacacgggcagacgcacagcacggttggtacgggtagcctcgttacggatagccaccaccacgttgaacagggaggggggcaccagctcgaaacccagcacgtgttcggtgaagatggaacgaccgtaggacagacgagtcaggtcgtaaccacggcacaggtcgtccacgcaagtgtacacagcgggggaaccgtcgccgcactcggagtaaccgcgcatcacggtcatccaacggggagcggtgtcggaggacagcagggtcagcagagcacgcagctggtcggggttgttgtacagcagggccagggtgtccaggaaagcgtcgtccagcagcacggagttagcagcctcgggggtcacgggacggtaacggatcagctgggacaggggaccgtccctacgggtcacgttgaccaggggacgcagccaggactcgtacttgtcgccctggaacacctctcccagcaggcaacgacgggtcagctcggggcactcagcgggcaccttctcagccacggtgggagccacggacacggtagcggaggacacgatgggcagcagcaggcagcaccacagcagagccacgggaccgggggagaaggagaaaccgcagtcgggacgacggcacatggtggctcgagatcccgggtgatcaagtcttcgtcgagtgattgtaaataaaatgtaatttacagtatagtattttaattaatatacaaatgatttgataataattcttatttaactataatatattgtgttgggttgaattaaaggtccgtatactagtatcgattcgcgacctactccggaatattaatagatcatggagataattaaaatgataaccatctcgcaaataaataagtattttactgttttcgtaacagttttgtaataaaaaaacctataaatattccggattattcataccgtcccaccatcgggcgcggatccgccaccatgaactccaaggacctgacccccttcctgaccaccctgtggctgctgctggaccactcccgtgtgcctcgtgtgcgtgctgaggaatgctgcgaagtgatcaacgtgaaccacccccccgagcgctgctacgacttcaagatgtgcaacctgttcaccgtggctctgcgttgccccgacggcgaagtgtgctactcccccgaaaagaccgctgagatccgtggtatcgtgaccaccatgacccactccctgacccgtcaagtgatccacaacaagctgaccagctgcaactacaaccccctgtacctcgaggctgacggtcgtatccgttgcggcaaggtgtccgacaaggctcagtacctgctgggtgctgctggttccgtgccctaccgttggatcaacctcgagtacgacaagatcacccgtatcgtgggcctggaccagtacctcgagtccgtgaagaagcacaagcgtctggacgtgtgccgtgctaagatgggttacatgctgcagtaaaagcttgtcgagaagtactagaggatcataatcagccataccacatttgtagaggttttacttgctttaaaaaacctcccacacctccccctgaacctgaaacataaaatgaatgcaattgttgttgttaacttgtttattgcagcttataatggttacaaataaagcaatagcatcacaaatttcacaaataaagcatttttttcactgcattctagttgtggtttgtccaaactcatcaatgtatcttatcatgtctggatctgatcactgcttgagcctagaagatccggctgctaacaaagcccgaaaggaagctgagttggctgctgtggctagctttgtttaactttaagaaggagatacatctagaccggaatattaatagatcatggagataattaaaatgataaccatctcgcaaataaataagtattttactgttttcgtaacagttttgtaataaaaaaacctataaatattccggattattcataccgtcccaccatcgggcgcggatccgccaccatgctgcgtctgctgctgcgtcaccacttccactgcctgctgctgtgcgctgtgtgggctaccccctgcctggcttccccttggtccaccctgaccgctaaccagaacccctccccaccctggtccaagctgacctactccaagccccacgacgctgctaccttctactgccccttcctgtacccatccccccctcgttccccactgcagttctccggtttccagcgtgtgctgaccggtcccgagtgccgtaacgagactctgtacctgctgtacaaccgcgagggccagaccctggtcgagaggtcctccacctgggtcaagaaggtcatctggtacttgtccggtcgtaaccagaccatcctgcagcgtatgccccgtaccgcttccaagccctccgacggcaacgtgcagatctccgtcgaggacgctaagatcttcggtgctcacatggtgcccaagcagaccaagctgctgcgtttcgtggtcaacgacggcacccgttaccagatgtgcgtgatgaagctcgagtcctgggctcacgtgttccgtgactactccgtgtccttccaagtgcgcctgaccttcaccgaggctaacaaccagacctacaccttctgcacccaccccaacctgatcgtgtaaaagcttgtcgagaagtactagaggatcataatcagccataccacatttgtagaggttttacttgctttaaaaaacctcccacacctccccctgaacctgaaacataaaatgaatgcaattgttgttgttaacttgtttattgcagcttataatggttacaaataaagcaatagcatcacaaatttcacaaataaagcatttttttcactgcattctagttgtggtttgtccaaactcatcaatgtatcttatcatgtctggatctgatcactgcttgagcctagaagatccggctgctaacaaagcccgaaaggaagctgagttggctgctgggtgcctaatgagtgagctaactcacattaattgcccggaatattaatagatcatggagataattaaaatgataaccatctcgcaaataaataagtattttactgttttcgtaacagttttgtaataaaaaaacctataaatattccggattattcataccgtcccaccatcgggcgcggatccgccaccatgcgtctgtgccgtgtgtggctgtccgtgtgcctgtgcgctgtggtgctgggccagtgccagcgtgaaaccgctgagaagaacgactactaccgtgtgccccactactgggacgcttgctcccgtgctctgcccgaccagacccgttacaagtacgtcgagcagctggtggacctgaccctgaactaccactacgacgcttcccacggcctggacaacttcgacgtgctgaagcgtatcaacgtgaccgaggtgtccctgctgatctccgacttccgtcgtcagaaccgtcgtggtggcaccaacaagcgtaccaccttcaacgctgctggttccctggctccccacgctcgttccctcgagttctccgtgcgtctgttcgctaactaaaagcttgtcgagaagtactagaggatcataatcagccataccacatttgtagaggttttacttgctttaaaaaacctcccacacctccccctgaacctgaaacataaaatgaatgcaattgttgttgttaacttgtttattgcagcttataatggttacaaataaagcaatagcatcacaaatttcacaaataaagcatttttttcactgcattctagttgtggtttgtccaaactcatcaatgtatcttatcatgtctggatctgatcactgcttgagcctagaagatccggctgctaacaaagcccgaaaggaagctgagttggctgctgccaccgctgagcaataactatcataacccccggaatattaatagatcatggagataattaaaatgataaccatctcgcaaataaataagtattttactgttttcgtaacagttttgtaataaaaaaacctataaatattccggattattcataccgtcccaccatcgggcgcggatcccggtccgaagcgcgcggaattcaaaggcctaccgtcgacgccaccatggaatcccgtatctggtgcctggtcgtgtgcgtgaacctgtgcatcgtgtgcctgggtgctgctgtgtcctcctcctccacccgtggcacctccgctacccactcccaccactcctcccacaccacctccgccgctcactcccgttccggttccgtgtcccagcgtgtgacctcctcccagaccgtgtcccacggtgtcaacgagactatctacaacaccaccctgaagtacggcgacgtcgtgggtgtcaacaccaccaagtacccctaccgtgtgtgctccatggctcagggcaccgacctgatccgtttcgagcgtaacatcgtgtgcacctccatgaagcccatcaacgaggacctggacgagggtatcatggtggtgtacaagcgcaacatcgtggctcacaccttcaaggtccgcgtgtaccagaaggtgctgaccttccgtcgttcctacgcttacatccacaccacttacctgctgggttccaacaccgagtacgtggcccctcccatgtgggagatccaccacatcaactcccactcccagtgctactcctcttactcccgtgtgatcgctggcaccgtgttcgtggcttaccaccgtgactcctacgagaacaagaccatgcagctgatgcccgacgactactccaacacccactccacccgttacgtgaccgtgaaggaccagtggcactcccgtggttccacctggctgtaccgtgaaacctgcaacctgaactgcatggtcaccatcaccaccgctcgttccaagtacccttaccacttcttcgctacctccaccggcgacgtggtggacatctcccccttctacaacggtactaaccgtaacgcttcctacttcggcgagaacgctgacaagttcttcatcttccccaactacaccatcgtgtccgacttcggtcgtcccaactccgctctggaaacccaccgtctggtggctttcttggagcgtgctgactccgtgatctcctgggacatccaggacgagaagaacgtgacctgccagctgaccttctgggaggcttccgagcgtaccatccgttccgaggctgaggactcctaccacttctccagcgctaagatgaccgctaccttcctgtccaagaaacaagaggtcaacatgtccgactccgccctggactgcgtgcgtgacgaggctatcaacaagctgcagcagatcttcaacacctcctacaaccagacctacgagaagtacggaaacgtgtccgtgttcgagactaccggtggcctggtggtgttctggcagggtatcaagcagaagtccctggtcgagctggaacgtctggctaaccgttcctccctgaacctgacccacaaccgtaccaagcgttccaccgacggcaacaacgctactcacctgtccaacatggaatccgtgcacaacctggtgtacgctcagctgcagttcacctacgacaccctgcgcggttacatcaaccgtgctctggctcagatcgctgaggcttggtgcgtggaccagcgtcgtaccctggaagtgttcaaggaactgtccaagatcaacccctccgctatcctgtccgccatctacaacaagcctatcgctgctcgtttcatgggcgacgtgctgggcctggcttcctgcgtgaccatcaaccagacttccgtgaaggtgctgcgtgacatgaacgtgaaggaatcccccggtcgttgctactcccgtcccgtggtcatcttcaacttcgctaactcctcctacgtgcagtacggccagctgggcgaggacaacgagatcctgctgggcaaccaccgtaccgaggaatgccagctgccctccctgaagatcttcatcgctggcaactccgcttacgaatacgtggactacctgttcaagcgcatgatcgacctgtcctccatctctaccgtggactccatgatcgctctggacatcgaccccctggaaaacaccgacttccgtgtgctggaactgtactcccagaaggaactgcgttccatcaacgtgttcgacctggaagagatcatgcgcgagttcaactcctacaagcagcgtgttaagtacgtcgaggacaaggtggtggaccccctgcccccctacctgaagggactggacgacctgatgtccggcctgggagctgccggcaaggctgtgggtgtcgctatcggtgctgtgggtggtgctgtggcttccgtggtcgagggtgtcgccaccttcctgaagaaccccttcggtgctttcaccatcatcctggtggctatcgctgtggtcatcatcatctacctgatctacacccgtcagcgtcgtctgtgcatgcagcccctgcagaacctgttcccctacctggtgtccgctgacggtactaccgtgacctccggcaacaccaaggacacctccctgcaggctcccccatcctacgaggaatccgtctacaactccggtcgcaagggtcccggtcccccttcctccgacgcttctaccgctgctcccccatacaccaacgagcaggcttaccagatgctgctggctctcgtgcgtctggacgctgagcagcgtgcacagcagaacggcaccgactccctggacggccagaccggaacccaggacaagggccagaagcccaacctgctggaccgtctgcgtcaccgcaagaacggttaccgtcacctgaaggactccgacgaggaagagaacgtctaaggcgcgccaagcttgtcgagaagtactagagatcataatcagccataccacatttgtagaggttttacttgctttaaaaaacctcccacacctccccctgaacctgaaacataaaatgaatgcaattgttgttgttaacttgtttattgcagcttataatggttacaaataaagcaatagcatcacaaatttcacaaataaagcatttttttcactgcattctagttgtggtttgtccaaactcatcaatgtatcttatcatgtctggatctgatcactgcttgagcctagaagatccggctgctaacaaagcccgaaaggaagctgggaatattaatagatcatggagataattaaaatgataaccatctcgcaaataaataagtattttactgttttcgtaacagttttgtaataaaaaaacctataaatattccggattattcataccgtcccaccatcgggcgcggatccgccaccatgcgtcccggcctgccctcctacctgatcgtgctggctgtgtgcctgctgtcccacctcctgtcctcccgttacggtgctgaggctatctccgagcccctggacaaggctttccacctcctgctgaacacctacggtcgtcctatccgtttcctgcgcgagaacaccacccagtgcacctacaactcctccctgcgcaactccaccgtcgtccgcgagaacgctatctccttcaacttcttccagtcctacaaccagtactacgtgttccacatgccccgttgcctgttcgctggtcccctggctgagcagttcctgaaccaggtggacctgaccgagactctcgagcgttaccagcagcgtctgaacacttacgctctggtgtccaaggacctggcttcctaccgttccttcagccagcagctgaaggctcaggactccctgggcgagcagcccaccactgtgcctccccctatcgacctgtccatcccccacgtgtggatgcccccccagaccactcctcacggctggaccgagtcccacaccacctccggactgcaccgtccccacttcaaccagacctgcatcctgttcgacggtcacgacctgctgttctccaccgtgaccccctgcctgcaccagggcttctacctcatcgacgagctgcgttacgtgaagatcaccctgaccgaggatttcttcgtggtcaccgtgtccatcgacgacgacacccccatgctgctgatcttcggtcacctcccccgtgtgctgttcaaggctccctaccagcgtgacaacttcatcctgcgtcagaccgagaagcacgagctgctggtgctggtcaagaaggaccagctgaaccgtcactcttacctgaaggaccccgacttcctggacgctgctctggacttcaactacctggacctgtccgctctgctgaggaactccttccaccgttacgctgtggacgtgctgaagtccggtcgttgccagatgctggaccgtcgtaccgtcgagatggctttcgcttacgccctggctctgttcgctgctgctcgtcaagaagaggctggcgctcaggtgtccgtgccccgtgctctggaccgtcaggctgctctgctgcagatccaagagttcatgatcacttgcctgtcccagaccccccctcgtaccaccctgctgctgtaccccaccgctgtggacctggctaagcgtgctctgtggacccccaaccagatcaccgacatcacctccctcgtgcgtctggtgtacatcctgtccaagcagaaccagcagcacctgatcccccagtgggctctgcgtcagatcgctgacttcgctctgaagctgcacaagacccacctggcttcattcctcagcgctttcgctcgccaagagctgtacctgatgggttccctggtgcactccatgctggtgcacaccaccgagcgtcgcgagatcttcatcgtggaaaccggcctgtgctccctggccgagctgtcccacttcacccagctgctggctcacccccaccacgagtacctgtccgacctgtacaccccctgctcctcttccggtcgtcgtgaccactccctggaacgtctgacccgtctgttccccgacgctaccgtgcctaccaccgtgcctgctgctctgtccatcctgtctaccatgcagccctccaccctggaaaccttccccgacctgttctgcctgcctctgggcgagtccttctccgctctgaccgtgtccgagcacgtgtcctacgtggtcaccaaccagtacctgatcaagggcatctcctaccccgtgtccaccaccgtcgtgggccagtccctgatcatcacccagaccgactcccagaccaagtgcgagctgacccgtaacatgcacaccactcactccatcaccgctgctctgaacatctccctcgagaactgcgctttctgccagtccgctctgttggagtacgacgacactcagggtgtcatcaacatcatgtacatgcacgactccgacgacgtgctgttcgctctggacccctacaacgaggtggtggtgtcctccccccgtacccactacctgatgctgctgaagaacggcaccgtgctggaagtgaccgacgtggtggtggacgctaccgaccgtctgctgatgatgtccgtgtacgctctgtccgctatcatcggcatctacctgctgtaccgtatgctgaagacctgctaaggcgccaagctttgtcgagaagtactagaggatcataatcagccataccacatttgtagaggttttacttgctttaaaaaacctcccacacctccccctgaacctgaaacataaaatgaatgcaattgttgttgttaacttgtttattgcagcttataatggttacaaataaagcaatagcatcacaaatttcacaaataaagcatttttttcactgcattctagttgtggtttgtccaaactcatcaatgtatcttatcatgtctggatctgatcactgcttgagcctagaagatccggctgctaacaaagcccgaaaggaagctgagttggctgctgccaccgctgagcaataactatcataacccctaggagatccgaaccagataagtgaaatctagttccaaactattttgtcatttttaattttcgtattagcttacgacgctacacccagttcccatctattttgtcactcttccctaaataatccttaaaaactccatttccacccctcccagttcccaactattttgtccgcccaca

SEQ ID NO: 41 - DNA, 22369 bp, Artificial Sequence
  Synthetic construct
ttgttccagtttggaacaagagtccactattaaagaacgtggactccaacgtcaaagggcgaaaaaccgtctatcagggcgatggcccactacgtgaaccatcaccctaatcaagttttttggggtcgaggtgccgtaaagcactaaatcggaaccctaaagggagcccccgatttagagcttgacggggaaagccggcgaacgtggcgagaaaggaagggaagaaagcgaaaggagcgggcgctagggcgctggcaagtgtagcggtcacgctgcgcgtaaccaccacacccgccgcgcttaatgcgccgctacagggcgcgtccattcgccattcaggctgcgcaactgttgggaagggcgatcggtgcgggcctcttcgctattacgccagctggcgaaagggggatgtgctgcaaggcgattaagttgggtaacgccagggttttcccagtcacgacgttgtaaaacgacggccagtgcatagaccagccgcgtaacctggcaaaatcggttacggttgagtaataaatggatgccctgcgtaagcgggtgtgggcggacaataaagtcttaaactgaacaaaatagatctaaactatgacaataaagtcttaaactagacagaatagttgtaaactgaaatcagtccagttatgctgtgaaaaagcatactggacttttgttatggctaaagcaaactcttcattttctgaagtgcaaattgcccgtcgtattaaagaggggcgtggccaagggcatggtaaagactatattcgcggcgttgtgacaatttaccgaacaactccgcggccgggaagccgatctcggcttgaacgaattgttaggtggcggtacttgggtcgatatcaaagtgcatcacttcttcccgtatgcccaactttgtatagagagccactgcgggatcgtcaccgtaatctgcttgcacgtagatcacataagcaccaagcgcgttggcctcatgcttgaggagattgatgagcgcggtggcaatgccctgcctccggtgctcgccggagactgcgagatcatagatatagatctcactacgcggctgctcaaacttgggcagaacgtaagccgcgagagcgccaacaaccgcttcttggtcgaaggcagcaagcgcgatgaatgtcttactacggagcaagttcccgaggtaatcggagtccggctgatgttgggagtaggtggctacgtctccgaactcacgaccgaaaagatcaagagcagcccgcatggatttgacttggtcagggccgagcctacatgtgcgaatgatgcccatacttgagccacctaactttgttttagggcgactgccctgctgcgtaacatcgttgctgctgcgtaacatcgttgctgctccataacatcaaacatcgacccacggcgtaacgcgcttgctgcttggatgcccgaggcatagactgtacaaaaaaacagtcataacaagccatgaaaaccgccactgcgccgttaccaccgctgcgttcggtcaaggttctggaccagttgcgtgagcgcatacgctacttgcattacagtttacgaaccgaacaggcttatgtcaactgggtttgtgccttcatccgtttccacggtgtgcgtcacccggcaaccttgggcagcagcgaagtcgaggcatttctgtcctggctggcgaacgagcgcaaggtttcggtctccacgcatcgtcaggcattggcggccttgctgttcttctacggcaaggtgctgtgcacggatctgcccttgcttcaggagatcggtagacctcggccgtcgcggcgcttgccggtggtgctgaccccggatgaagtggttcgcatcctcggttttctggaaggcgagcatcgtttgttcgcccaggactctagctatagttctagtggttggctacagctttgtttgtactatcaacaggttgaactgctgatcaacagatcctctacgcggccgcggtaccataacttcgtatagcatacattatacgaagttatctggtttaaacgtacccgtagtggctatggcagggcttgccgccccgacgttggctgcgagccctgggccttcacccgaacttgggggttggggtggggaaaaggaagaaacgcgggcgtattggtcccaatggggtctcggtggggtatcgacagagtgccagccctgggaccgaaccccgcgtttatgaacaaacgacccaacacccgtgcgttttattctgtctttttattgccgtcatagcgcgggttccttccggtattgtctccttccgtgtttcagttagcctcccccatctcccggtaccgcatgctatgcatcagctgctagcaccatggctcgagatcccgggtgatcaagtcttcgtcgagtgattgtaaataaaatgtaatttacagtatagtattttaattaatatacaaatgatttgataataattcttatttaactataatatattgtgttgggttgaattaaaggtccgtatactagtatcgattcgcgacctactccggaatattaatagatcatggagataattaaaatgataaccatctcgcaaataaataagtattttactgttttcgtaacagttttgtaataaaaaaacctataaatattccggattattcataccgtcccaccatcgggcgcggatccgccaccatggaaaactggtccgctctggaactgctgcccaaggtcggaatccctaccgacttcctgacccacgtcaagacctccgctggcgaggaaatgttcgaggctctgaggatctactacggcgacgaccccgagcgttacaacatccacttcgaggctatcttcggcaccttctgcaaccgtctggaatgggtgtacttcctgacttccggcctggctgctgctgctcacgctatcaagttccacgacctgaacaagctgaccaccggcaagatgctgttccacgtgcaagtgccccgtgtggcttccggtgctggcctgcctacctcccgtcagaccaccatcatggtcaccaagtactccgagaagtcccccatcaccatccctttcgagctgtccgctgcttgcctgacttacctgcgtgaaaccttcgagggcaccatcctggacaagatcctgaacgtcgaggctatgcacaccgtgctgcgtgctctgaagaacaccgctgacgctatggaacgtggcctgatccacagcttcctccagaccctgctgaggaaggctcccccctacttcgtggtgcagaccctggtcgagaacgctaccctggctcgtcaggctctgaaccgtatccagcgctccaacatcctgcagtccttcaaggctaagatgctggctaccctgttcctgctgaaccgtacccgtgaccgtgactacgtgctgaagttcctgacccgtctggctgaggctgctaccgactccatcctcgacaaccctactacctacaccacctcctccggtgctaagatctccggtgtcatggtgtccaccgctaacgtgatgcagatcatcatgtccctgctgtcctcccacatcactaaggaaaccgtgtccgctcccgctacctacggcaacttcgtgctgtcccccgagaacgctgtgaccgctatctcctaccactctatcctggctgacttcaactcctacaaggctcacctgacctccggccagccccacctccccaacgactccctgagccaggctggtgctcactccctgacccccctgtccatggacgtgatccgtctgggcgaaaagaccgtgatcatggaaaacctgcgtcgcgtgtacaagaacaccgacaccaaggaccccctggaacgtaacgtggacctgaccttcttcttccccgtgggcctgtacctgcccgaggaccgtggttacaccaccgtcgagtccaaggtcaagctgaacgacaccgtgcgtaacgctctgcccaccaccgcttacctgctgaacagggaccgtgctgtgcaaaagatcgacttcgtggacgctctcaagaccctgtgccaccccgtgctgcacgagcctgctccatgcctgcaggctttcaccgagcgtggtcccccatccgagcccgctatgcagcgtctgctggaatgccgtttccagcaagagcccatgggtggtgctgctcgtcgtatcccccacttctaccgtgtgcgccgcgaggtgccccgtaccgtgaacgagatgaagcaggacttcgtggtcaccgacttctacaaggttggaaacatcaccctgtacaccgagctgcaccctttcttcgacttcacccactgccaagagaactccgagactgtggctctgtgcaccccccgtatcgtgatcggcaacctgcccgacggcctggctcccggtcccttccacgagctgaggacctgggagatcatggaacacatgcgcctgcgtcccccacccgactacgaggaaaccctgcgtctgttcaagaccaccgtgacctcccccaactaccccgagctgtgctacctggtggacgtgctggtgcacggcaacgctgacgctttcctgctgatccgcgctttcatcgctcgttgcatcgtgaacatgttccacacccgtcagctgctggtgttcgctcactcctacgctctggtcaccctgatcgctgagcacctggctgacggtgctctgcccccccagctcctgttccactaccgtaacctggtggctgtgctgcgcctggtcacccgtatctccgctctgcccggcctgaacaacggccagctggctgaggaacccctgtccgcttacgtgaacgctctgcacgaccacaggctgtggccccccttcgtgacccacctccctcgtaacatggaaggtgtccaggtggtggctgatcgtcagcccctgaaccccgctaacatcgaggctcgtcaccacggtgtctccgacgtgccccgtctgggtgctatggacgctgacgagcccctgttcgtggacgactaccgtgctaccgacgacgagtggaccctgcaaaaggtgttctacctgtgcctgatccccgctatgaccaacaaccgtgcttgcggcctgggcctgaacctcaagactctgctggtggacctgttctaccgtcccgccttcctgctcatgcccgctgctaccgctgtgtccacctccggcaccacctccaaggaatccacctctggtgtcacccccgaggactccgtggctgctcagcgtcaggctgtgggcgagatgctgaccgagctggtcgaggacgtggccaccgacgctcacacccctctgctgcaggcttgccgcgagctgttcctggctgtgcagttcgtgggcgagcacgtgaaggtgctggaagtgcgtgctcccctggaccacgctcagaggcagggactgcccgacttcatctcccgtcagcatgtgctgtacaacggttgctgcgtcgtgaccgctcctaagaccctgatcgagtactccctgcccgtgcccttccaccgtttctactccaaccccaccatctgcgctgctctgtccgacgacatcaagcgttacgtgaccgagttcccccactaccatagacacgatggtggtttccccctgcccaccgctttcgctcacgagtaccacaactggctgcgtagccccttctcccgttactccgctacctgccccaacgtgctgcactccgtgatgaccctggctgctatgctgtacaagatctcccccgtgtccctggtgctgcagaccaaggctcacatccaccccggtttcgctctgaccgctgtgcgtaccgacaccttcgaggtggacatgctgctgtactccggcaagtcctgcacctccgtcatcatcaacaaccccatcgtgaccaaggaagagagggacatctccaccacctaccacgtgacccagaacatcaacaccgtggacatgggcctgggttacacctccaacacttgcgtggcctacgtgaaccgcgtccgcaccgacatgggtgtccgtgtgcaggacctgttccgtgtgttccccatgaacgtgtaccgccacgatgaggtggaccgttggatcaggcacgctgctggcgtcgagcgtccccagctgctggacaccgagactatctccatgctgaccttcggttccatgtccgagcgcaacgctgctgctaccgtgcacggccagaaggctgtctgcgagctgatcctgacccctgtgactatggacgtgaactacttcaagatcaccaacaaccctcgtggtcgtgcttcctgcatgctgggcgtggacccctacgacaccgaggctgccaccaaggctatctacgaccaccgcgaggctgacgctcagaccttcgctgctacccacaacccatgggcttcccaggctggttgcctgtccgacgtcctgtacaacacccgtcaccgcgagcgtctgggctacaactccaagttctactccccctgcgctcagtacttcaacaccgaggaaatcatcgctgccaacaagaccctcttcaagaccatcgacgagtacctgctgcgcgctaaggactgcatccgtggcgacaccgacactcagtacgtgtgcgtcgagggaaccgagcagctgatcgagaacccttgccgtctgacccaagaggctctgcccatcctgtccaccaccaccctggctctgatggaaactaagctgaagggtggcgctggtgctttcgctacctccgagactcacttcggcaactacgtcgtgggagagatcatccccctgcagcagtccatgctgttcaacagctaagagctcaagcttgtcgagaagtactagaggatcataatcagccataccacatttgtagaggttttacttgctttaaaaaacctcccacacctccccctgaacctgaaacataaaatgaatgcaattgttgttgttaacttgtttattgcagcttataatggttacaaataaagcaatagcatcacaaatttcacaaataaagcatttttttcactgcattctagttgtggtttgtccaaactcatcaatgtatcttatcatgtctggatctgatcactgcttgagcctagaagatccggctgctaacaaagcccgaaaggaagctgagttggctgctgtggctagctttgtttaactttaagaaggagatacatctagaaatattaatagatcatggagataattaaaatgataaccatctcgcaaataaataagtattttactgttttcgtaacagttttgtaataaaaaaacctataaatattccggattattcataccgtcccaccatcgggcgcggatcccggtccgaagcgcgcggaattcgccaccatgaccatggacgagcagcagccccaggctgtgacccccgtgtacgtgggcggtttcctggctcgttacgaccagtcccccgacgaggctgagctgctgctgccacgtgacgtggtcgaacactggctgcacgctcagggccagggacagccttccctgtccgtggctctgcccctgaacatcaaccacgacgacaccgctgtcgtgggtcacgtggccgctatgcagtccgtgcgtgacggcctgttctgcctgggttgcgtgacctccccccgtttcctggaaatcgtgcgtcgtgcttccgagaagtccgagctggtgtcccgtggtcccgtgtccccactgcagcccgacaaggtggtcgagttcctgtccggttcctacgctggcctgtccctgtcatcccgtcgttgcgacgacgtcgaggctgctacctccctgagcggctccgagactacccccttcaagcacgtggccctgtgctccgtgggtcgtaggcgtggaaccctggctgtgtacggtcgtgaccccgagtgggtcacccagcgtttccccgacctgaccgctgctgaccgtgacggactgcgtgctcagtggcagcgttgcggttccaccgctgtggacgcttccggcgaccccttccgttccgactcctacggcctgctgggcaactccgtggacgctctgtacatccgcgagcgtctgcccaagctgcgttacgacaagcagctcgtgggtgtcaccgagcgcgagtcctacgtgaaggcttccgtgtcccccgaggctgcttgcgacatcaaggctgcttccgctgagcgttctggcgacagccgctcccaggctgctactcctgctgctggtgctcgtgtgccctccagctccccatccccacctgtcgagcctccctcccccgtgcaacctcctgctctgcctgcttccccctccgtgctgcctgctgagtccagcccctccctgtcaccctctgagcctgctgaggctgcctccatgtcccaccctctgagcgctgctgtgactgctgctaccgctccccctggtgctactgtggctggtgcttcccccgctgtgccttccctggcttggcctcacgacggtgtctacctgcccaaggacgctttcttctccctgctgggcgcttcccgttccgctgctcccgtgatgtaccccggtgctgtggctgctccccccagcgcttcacctgctcctctgcccctgccctcctaccccgcttcctacggtgctcccgtcgtgggttacgaccagctggctgctcgtcacttcgctgactacgtggacccccactaccccggctggggtcgtcgttacgagcccgctccttccctgcacccatcctaccctgtgccccctcctccatcacccgcttactaccgtcgtcgtgactcccccggtggcatggacgagcctccatctggatgggagcgttacgacggttcccaccgtggccagtcccaaaagcagcaccgtcacggtggttccggtggtcacaacaagcgtcgcaaggaagccgctgctgcatcctccagctccgacgaggacctgagcttccccggcgaggctgaacacggtcgtgctcgcaagcgtctgaagtcccacgtgaactccgacggaggtagcggaggccacgctggttccaaccagcagcagcaacagcgctacgacgagctgcgtgacgctatccacgagctgaagcgtgacctgttcgctgctcgccagtcctccaccctgctgtctgctgctctgccagctgccgcttcttcctcccctaccaccaccaccgtgtgcacccctactggcgagctgacctctggtggtggcgagactcccaccgctctgctgtccggtggtgctaaggtggccgagcgtgctcaggctggtgtcgtgaacgcttcctgccgtctggctaccgcttccggttccgaggctgccaccgctggtccctctaccgctggttcctcatcctgcccagcttccgtggtgctggctgccgctgctgctcaagccgccgctgcttcacagtcccccccaaaggatatggtggacctgaaccgtcgtatcttcgtggctgctctgaacaagctcgagtaataaaagcttgtcgagaagtactagaggatcataatcagccataccacatttgtagaggttttacttgctttaaaaaacctcccacacctccccctgaacctgaaacataaaatgaatgcaattgttgttgttaacttgtttattgcagcttataatggttacaaataaagcaatagcatcacaaatttcacaaataaagcatttttttcactgcattctagttgtggtttgtccaaactcatcaatgtatcttatcatgtctggatctgatcactgcttgagcctagaagatccggctgctaacaaagcccgaaaggaagctgagttggctgctgccaccgctgagcaataactatcataacccctaggggcctctaaacgggtcttgaggggttttttgctgaaaggaggaactatatccggatctgaacaggagggacagctgatagaaacagaagccactggagcacctcaaaaacaccatcatacactaaatcagtaagttggcagcatcacccgacgcactttgcgccgaataaatacctgtgacggaagatcacttcgcagaataaataaatcctggtgtccctgttgataccgggaagccctgggccaacttttggcgaaaatgagacgttgatcggcacgtaagaggttccaactttcaccataatgaaataagatcactaccgggcgtattttttgagttatcgagattttcaggagctaaggaagctaaaatggagaaaaaaatcactggatataccaccgttgatatatcccaatggcatcgtaaagaacattttgaggcatttcagtcagttgctcaatgtacctataaccagaccgttcagctggatattacggcctttttaaagaccgtaaagaaaaataagcacaagttttatccggcctttattcacattcttgcccgcctgatgaatgctcatccggaattccgtatggcaatgaaagacggtgagctggtgatatgggatagtgttcacccttgttacaccgttttccatgagcaaactgaaacgttttcatcgctctggagtgaataccacgacgatttccggcagtttctacacatatattcgcaagatgtggcgtgttacggtgaaaacctggcctatttccctaaagggtttattgagaatatgtttttcgtctcagccaatccctgggtgagtttcaccagttttgatttaaacgtggccaatatggacaacttcttcgcccccgttttcaccatgggcaaatattatacgcaaggcgacaaggtgctgatgccgctggcgattcaggttcatcatgccgtttgtgatggcttccatgtcggcagaatgcttaatgaattacaacagtactgcgatgagtggcagggcggggcgtaatttttttaaggcagttattggtgcccttaaacgcctggttgctacgcctgaataagtgataataagcggatgaatggcagaaattcgaaagcaaattcgacccggtcgtcggttcagggcagggtcgttaaatagccgcttatgtctattgctggtttaccggtttattgactaccggaagcagtgtgaccgtgtgcttctcaaatgcctgaggccagtttgctcaggctctccccgtggaggtaataattgacgatatgatcatttattctgcctcccagctgacattcatccggggtcagcaccgtttctgcggactggctttctacgtgttccgcttcctttagcagcccttgcgccctgagtgcttgcggcagcgtgaagctaattctgtcagccgttaagtgttcctgtgtcactcaaaattgctttgagaggctctaagggcttctcagtgcgttacatccctggcttgttgtccacaaccgttaaaccttaaaagctttaaaagccttatatattcttttttttcttataaaacttaaaaccttagaggctatttaagttgctgatttatattaattttattgttcaaacatgagagcttagtacgtgaaacatgagagcttagtacgttagccatgagagcttagtacgttagccatgagggtttagttcgttaaacatgagagcttagtacgttaaacatgagagcttagtacgtgaaacatgagagcttagtacgtactatcaacaggttgaactgctgatcaacagatcctctacgcggccgcggtaccataacttcgtatagcatacattatacgaagttatctggtttaaacgtacccgtagtggctatggcagggcttgccgccccgacgttggctgcgagccctgggccttcacccgaacttgggggttggggtggggaaaaggaagaaacgcgggcgtattggtcccaatggggtctcggtggggtatcgacagagtgccagccctgggaccgaaccccgcgtttatgaacaaacgacccaacacccgtgcgttttattctgtctttttattgccgtcatagcgcgggttccttccggtattgtctccttccgtgtttcagttagcctcccccatctcccggtaccgcatgctatgcatcagctgctagcttagcgagcgtccacagcctggggaccgtaacgggagtgagcgggcaggttcacacgggtctgcttcagctcagggggcaggccagcgtagtacttgtccaggtgacgcagcaggggggggtccagctggtgacgcaggcagaattccttcacagcgttgtacaggccgtagaacagggtgataccctcgggagcagcagcggtggacacgggcagacgcacagcacggttggtacgggtagcctcgttacggatagccaccaccacgttgaacagggaggggggcaccagctcgaaacccagcacgtgttcggtgaagatggaacgaccgtaggacagacgagtcaggtcgtaaccacggcacaggtcgtccacgcaagtgtacacagcgggggaaccgtcgccgcactcggagtaaccgcgcatcacggtcatccaacggggagcggtgtcggaggacagcagggtcagcagagcacgcagctggtcggggttgttgtacagcagggccagggtgtccaggaaagcgtcgtccagcagcacggagttagcagcctcgggggtcacgggacggtaacggatcagctgggacaggggaccgtccctacgggtcacgttgaccaggggacgcagccaggactcgtacttgtcgccctggaacacctctcccagcaggcaacgacgggtcagctcggggcactcagcgggcaccttctcagccacggtgggagccacggacacggtagcggaggacacgatgggcagcagcaggcagcaccacagcagagccacgggaccgggggagaaggagaaaccgcagtcgggacgacggcacatggtggctcgagatcccgggtgatcaagtcttcgtcgagtgattgtaaataaaatgtaatttacagtatagtattttaattaatatacaaatgatttgataataattcttatttaactataatatattgtgttgggttgaattaaaggtccgtatactagtatcgattcgcgacctactccggaatattaatagatcatggagataattaaaatgataaccatctcgcaaataaataagtattttactgttttcgtaacagttttgtaataaaaaaacctataaatattccggattattcataccgtcccaccatcgggcgcggatccgccaccatgaactccaaggacctgacccccttcctgaccaccctgtggctgctgctggaccactcccgtgtgcctcgtgtgcgtgctgaggaatgctgcgaagtgatcaacgtgaaccacccccccgagcgctgctacgacttcaagatgtgcaacctgttcaccgtggctctgcgttgccccgacggcgaagtgtgctactcccccgaaaagaccgctgagatccgtggtatcgtgaccaccatgacccactccctgacccgtcaagtgatccacaacaagctgaccagctgcaactacaaccccctgtacctcgaggctgacggtcgtatccgttgcggcaaggtgtccgacaaggctcagtacctgctgggtgctgctggttccgtgccctaccgttggatcaacctcgagtacgacaagatcacccgtatcgtgggcctggaccagtacctcgagtccgtgaagaagcacaagcgtctggacgtgtgccgtgctaagatgggttacatgctgcagtaaaagcttgtcgagaagtactagaggatcataatcagccataccacatttgtagaggttttacttgctttaaaaaacctcccacacctccccctgaacctgaaacataaaatgaatgcaattgttgttgttaacttgtttattgcagcttataatggttacaaataaagcaatagcatcacaaatttcacaaataaagcatttttttcactgcattctagttgtggtttgtccaaactcatcaatgtatcttatcatgtctggatctgatcactgcttgagcctagaagatccggctgctaacaaagcccgaaaggaagctgagttggctgctgtggctagctttgtttaactttaagaaggagatacatctagaccggaatattaatagatcatggagataattaaaatgataaccatctcgcaaataaataagtattttactgttttcgtaacagttttgtaataaaaaaacctataaatattccggattattcataccgtcccaccatcgggcgcggatccgccaccatgctgcgtctgctgctgcgtcaccacttccactgcctgctgctgtgcgctgtgtgggctaccccctgcctggcttccccctggttcaccctgaccgctaaccagaacccctccccaccctggtccaagctgacctaccccaagccccacgacgctgctaccttctactgccccttcctgtacccatccccacctcgttccccatcccagttctccggtttccagcgtgtgtccaccggtcccgagtgccgtaacgagactctgtacctgctgtacaaccgcgagggccagaccctggtcgagaggtcctccacctgggtcaagaaggtcatctggtacttgtccggtcgtaaccagaccatcctgcagcgtatgccccgtaccgcttccaagccctccgacggcaacgtgcagatctccgtcgaggacgctaagatcttcggtgctcacatggtgcccaagcagaccaagctgctgcgtttcgtggtcaacgacggcacccgttaccagatgtgcgtgatgaagctggaatcctgggctcacgtgttccgtgactactccgtgtccttccaagtgcgcctgaccttcaccgaggctaacaaccagacctacaccttctgcacccaccccaacctgatcgtgtaagtcgacaagcttgtcgagaagtactagaggatcataatcagccataccacatttgtagaggttttacttgctttaaaaaacctcccacacctccccctgaacctgaaacataaaatgaatgcaattgttgttgttaacttgtttattgcagcttataatggttacaaataaagcaatagcatcacaaatttcacaaataaagcatttttttcactgcattctagttgtggtttgtccaaactcatcaatgtatcttatcatgtctggatctgatcactgcttgagcctagaagatccggctgctaacaaagcccgaaaggaagctgagttggctgctgggtgcctaatgagtgagctaactcacattaattgcccggaatattaatagatcatggagataattaaaatgataaccatctcgcaaataaataagtattttactgttttcgtaacagttttgtaataaaaaaacctataaatattccggattattcataccgtcccaccatcgggcgcggatccgccaccggatccgccaccatgcgtctgtgccgtgtgtggctgtccgtgtgcctgtgcgctgtggtgctgggacagtgccagcgtgaaaccgctgagaagaacgactactaccgtgtgccccactactgggacgcttgctcccgtgctctgcccgaccagacccgttacaagtacgtcgagcagctggtggacctgaccctgaactaccactacgacgcttcccacggcctggacaacttcgacgtgctgaagcgtatcaacgtgaccgaggtgtccctgctgatctccgacttccgtcgtcagaaccgtcgtggtggcaccaacaagcgtaccaccttcaacgctgctggttccctggctccccacgctcgttccttggagttctccgtgcgtctgttcgccaactaataaaagcttgtcgagaagtactagaggatcataatcagccataccacatttgtagaggttttacttgctttaaaaaacctcccacacctccccctgaacctgaaacataaaatgaatgcaattgttgttgttaacttgtttattgcagcttataatggttacaaataaagcaatagcatcacaaatttcacaaataaagcatttttttcactgcattctagttgtggtttgtccaaactcatcaatgtatcttatcatgtctggatctgatcactgcttgagcctagaagatccggctgctaacaaagcccgaaaggaagctgagttggctgctgccaccgctgagcaataactatcataacccccggaatattaatagatcatggagataattaaaatgataaccatctcgcaaataaataagtattttactgttttcgtaacagttttgtaataaaaaaacctataaatattccggattattcataccgtcccaccatcgggcgcggatcccggtccgaagcgcgcggaattcaaaggcctaccgtcgacgccaccatggaatcccgtatctggtgcctggtcgtgtgcgtgaacctgtgcatcgtgtgcctgggtgctgctgtgtcctcctcctccacccgtggcacctccgctacccactcccaccactcctcccacaccacctccgccgctcactcccgttccggttccgtgtcccagcgtgtgacctcctcccagaccgtgtcccacggtgtcaacgagactatctacaacaccaccctgaagtacggcgacgtcgtgggtgtcaacaccaccaagtacccctaccgtgtgtgctccatggctcagggcaccgacctgatccgtttcgagcgtaacatcgtgtgcacctccatgaagcccatcaacgaggacctggacgagggtatcatggtggtgtacaagcgcaacatcgtggctcacaccttcaaggtccgcgtgtaccagaaggtgctgaccttccgtcgttcctacgcttacatccacaccacttacctgctgggttccaacaccgagtacgtggcccctcccatgtgggagatccaccacatcaactcccactcccagtgctactcctcttactcccgtgtgatcgctggcaccgtgttcgtggcttaccaccgtgactcctacgagaacaagaccatgcagctgatgcccgacgactactccaacacccactccacccgttacgtgaccgtgaaggaccagtggcactcccgtggttccacctggctgtaccgtgaaacctgcaacctgaactgcatggtcaccatcaccaccgctcgttccaagtacccttaccacttcttcgctacctccaccggcgacgtggtggacatctcccccttctacaacggtactaaccgtaacgcttcctacttcggcgagaacgctgacaagttcttcatcttccccaactacaccatcgtgtccgacttcggtcgtcccaactccgctctggaaacccaccgtctggtggctttcttggagcgtgctgactccgtgatctcctgggacatccaggacgagaagaacgtgacctgccagctgaccttctgggaggcttccgagcgtaccatccgttccgaggctgaggactcctaccacttctccagcgctaagatgaccgctaccttcctgtccaagaaacaagaggtcaacatgtccgactccgccctggactgcgtgcgtgacgaggctatcaacaagctgcagcagatcttcaacacctcctacaaccagacctacgagaagtacggaaacgtgtccgtgttcgagactaccggtggcctggtggtgttctggcagggtatcaagcagaagtccctggtcgagctggaacgtctggctaaccgttcctccctgaacctgacccacaaccgtaccaagcgttccaccgacggcaacaacgctactcacctgtccaacatggaatccgtgcacaacctggtgtacgctcagctgcagttcacctacgacaccctgcgcggttacatcaaccgtgctctggctcagatcgctgaggcttggtgcgtggaccagcgtcgtaccctggaagtgttcaaggaactgtccaagatcaacccctccgctatcctgtccgccatctacaacaagcctatcgctgctcgtttcatgggcgacgtgctgggcctggcttcctgcgtgaccatcaaccagacttccgtgaaggtgctgcgtgacatgaacgtgaaggaatcccccggtcgttgctactcccgtcccgtggtcatcttcaacttcgctaactcctcctacgtgcagtacggccagctgggcgaggacaacgagatcctgctgggcaaccaccgtaccgaggaatgccagctgccctccctgaagatcttcatcgctggcaactccgcttacgaatacgtggactacctgttcaagcgcatgatcgacctgtcctccatctctaccgtggactccatgatcgctctggacatcgaccccctggaaaacaccgacttccgtgtgctggaactgtactcccagaaggaactgcgttccatcaacgtgttcgacctggaagagatcatgcgcgagttcaactcctacaagcagcgtgttaagtacgtcgaggacaaggtggtggaccccctgcccccctacctgaagggactggacgacctgatgtccggcctgggagctgccggcaaggctgtgggtgtcgctatcggtgctgtgggtggtgctgtggcttccgtggtcgagggtgtcgccaccttcctgaagaaccccttcggtgctttcaccatcatcctggtggctatcgctgtggtcatcatcatctacctgatctacacccgtcagcgtcgtctgtgcatgcagcccctgcagaacctgttcccctacctggtgtccgctgacggtactaccgtgacctccggcaacaccaaggacacctccctgcaggctcccccatcctacgaggaatccgtctacaactccggtcgcaagggtcccggtcccccttcctccgacgcttctaccgctgctcccccatacaccaacgagcaggcttaccagatgctgctggctctcgtgcgtctggacgctgagcagcgtgcacagcagaacggcaccgactccctggacggccagaccggaacccaggacaagggccagaagcccaacctgctggaccgtctgcgtcaccgcaagaacggttaccgtcacctgaaggactccgacgaggaagagaacgtctaaggcgcgccaagcttgtcgagaagtactagagatcataatcagccataccacatttgtagaggttttacttgctttaaaaaacctcccacacctccccctgaacctgaaacataaaatgaatgcaattgttgttgttaacttgtttattgcagcttataatggttacaaataaagcaatagcatcacaaatttcacaaataaagcatttttttcactgcattctagttgtggtttgtccaaactcatcaatgtatcttatcatgtctggatctgatcactgcttgagcctagaagatccggctgctaacaaagcccgaaaggaagctgggaatattaatagatcatggagataattaaaatgataaccatctcgcaaataaataagtattttactgttttcgtaacagttttgtaataaaaaaacctataaatattccggattattcataccgtcccaccatcgggcgcggatccgccaccatgcgtcccggcctgccctcctacctgatcgtgctggctgtgtgcctgctgtcccacctcctgtcctcccgttacggtgctgaggctatctccgagcccctggacaaggctttccacctcctgctgaacacctacggtcgtcctatccgtttcctgcgcgagaacaccacccagtgcacctacaactcctccctgcgcaactccaccgtcgtccgcgagaacgctatctccttcaacttcttccagtcctacaaccagtactacgtgttccacatgccccgttgcctgttcgctggtcccctggctgagcagttcctgaaccaggtggacctgaccgagactctcgagcgttaccagcagcgtctgaacacttacgctctggtgtccaaggacctggcttcctaccgttccttcagccagcagctgaaggctcaggactccctgggcgagcagcccaccactgtgcctccccctatcgacctgtccatcccccacgtgtggatgcccccccagaccactcctcacggctggaccgagtcccacaccacctccggactgcaccgtccccacttcaaccagacctgcatcctgttcgacggtcacgacctgctgttctccaccgtgaccccctgcctgcaccagggcttctacctcatcgacgagctgcgttacgtgaagatcaccctgaccgaggatttcttcgtggtcaccgtgtccatcgacgacgacacccccatgctgctgatcttcggtcacctcccccgtgtgctgttcaaggctccctaccagcgtgacaacttcatcctgcgtcagaccgagaagcacgagctgctggtgctggtcaagaaggaccagctgaaccgtcactcttacctgaaggaccccgacttcctggacgctgctctggacttcaactacctggacctgtccgctctgctgaggaactccttccaccgttacgctgtggacgtgctgaagtccggtcgttgccagatgctggaccgtcgtaccgtcgagatggctttcgcttacgccctggctctgttcgctgctgctcgtcaagaagaggctggcgctcaggtgtccgtgccccgtgctctggaccgtcaggctgctctgctgcagatccaagagttcatgatcacttgcctgtcccagaccccccctcgtaccaccctgctgctgtaccccaccgctgtggacctggctaagcgtgctctgtggacccccaaccagatcaccgacatcacctccctcgtgcgtctggtgtacatcctgtccaagcagaaccagcagcacctgatcccccagtgggctctgcgtcagatcgctgacttcgctctgaagctgcacaagacccacctggcttcattcctcagcgctttcgctcgccaagagctgtacctgatgggttccctggtgcactccatgctggtgcacaccaccgagcgtcgcgagatcttcatcgtggaaaccggcctgtgctccctggccgagctgtcccacttcacccagctgctggctcacccccaccacgagtacctgtccgacctgtacaccccctgctcctcttccggtcgtcgtgaccactccctggaacgtctgacccgtctgttccccgacgctaccgtgcctaccaccgtgcctgctgctctgtccatcctgtctaccatgcagccctccaccctggaaaccttccccgacctgttctgcctgcctctgggcgagtccttctccgctctgaccgtgtccgagcacgtgtcctacgtggtcaccaaccagtacctgatcaagggcatctcctaccccgtgtccaccaccgtcgtgggccagtccctgatcatcacccagaccgactcccagaccaagtgcgagctgacccgtaacatgcacaccactcactccatcaccgctgctctgaacatctccctcgagaactgcgctttctgccagtccgctctgttggagtacgacgacactcagggtgtcatcaacatcatgtacatgcacgactccgacgacgtgctgttcgctctggacccctacaacgaggtggtggtgtcctccccccgtacccactacctgatgctgctgaagaacggcaccgtgctggaagtgaccgacgtggtggtggacgctaccgaccgtctgctgatgatgtccgtgtacgctctgtccgctatcatcggcatctacctgctgtaccgtatgctgaagacctgctaaggcgccaagctttgtcgagaagtactagaggatcataatcagccataccacatttgtagaggttttacttgctttaaaaaacctcccacacctccccctgaacctgaaacataaaatgaatgcaattgttgttgttaacttgtttattgcagcttataatggttacaaataaagcaatagcatcacaaatttcacaaataaagcatttttttcactgcattctagttgtggtttgtccaaactcatcaatgtatcttatcatgtctggatctgatcactgcttgagcctagaagatccggctgctaacaaagcccgaaaggaagctgagttggctgctgccaccgctgagcaataactatcataacccctaggagatccgaaccagataagtgaaatctagttccaaactattttgtcatttttaattttcgtattagcttacgacgctacacccagttcccatctattttgtcactcttccctaaataatccttaaaaactccatttccacccctcccagttcccaactattttgtccgcccaca

SEQ ID NO: 42 - DNA, 25991 bp, Artificial Sequence
  Synthetic construct
ttgttccagtttggaacaagagtccactattaaagaacgtggactccaacgtcaaagggcgaaaaaccgtctatcagggcgatggcccactacgtgaaccatcaccctaatcaagttttttggggtcgaggtgccgtaaagcactaaatcggaaccctaaagggagcccccgatttagagcttgacggggaaagccggcgaacgtggcgagaaaggaagggaagaaagcgaaaggagcgggcgctagggcgctggcaagtgtagcggtcacgctgcgcgtaaccaccacacccgccgcgcttaatgcgccgctacagggcgcgtccattcgccattcaggctgcgcaactgttgggaagggcgatcggtgcgggcctcttcgctattacgccagctggcgaaagggggatgtgctgcaaggcgattaagttgggtaacgccagggttttcccagtcacgacgttgtaaaacgacggccagtgcatagaccagccgcgtaacctggcaaaatcggttacggttgagtaataaatggatgccctgcgtaagcgggtgtgggcggacaataaagtcttaaactgaacaaaatagatctaaactatgacaataaagtcttaaactagacagaatagttgtaaactgaaatcagtccagttatgctgtgaaaaagcatactggacttttgttatggctaaagcaaactcttcattttctgaagtgcaaattgcccgtcgtattaaagaggggcgtggccaagggcatggtaaagactatattcgcggcgttgtgacaatttaccgaacaactccgcggccgggaagccgatctcggcttgaacgaattgttaggtggcggtacttgggtcgatatcaaagtgcatcacttcttcccgtatgcccaactttgtatagagagccactgcgggatcgtcaccgtaatctgcttgcacgtagatcacataagcaccaagcgcgttggcctcatgcttgaggagattgatgagcgcggtggcaatgccctgcctccggtgctcgccggagactgcgagatcatagatatagatctcactacgcggctgctcaaacttgggcagaacgtaagccgcgagagcgccaacaaccgcttcttggtcgaaggcagcaagcgcgatgaatgtcttactacggagcaagttcccgaggtaatcggagtccggctgatgttgggagtaggtggctacgtctccgaactcacgaccgaaaagatcaagagcagcccgcatggatttgacttggtcagggccgagcctacatgtgcgaatgatgcccatacttgagccacctaactttgttttagggcgactgccctgctgcgtaacatcgttgctgctgcgtaacatcgttgctgctccataacatcaaacatcgacccacggcgtaacgcgcttgctgcttggatgcccgaggcatagactgtacaaaaaaacagtcataacaagccatgaaaaccgccactgcgccgttaccaccgctgcgttcggtcaaggttctggaccagttgcgtgagcgcatacgctacttgcattacagtttacgaaccgaacaggcttatgtcaactgggtttgtgccttcatccgtttccacggtgtgcgtcacccggcaaccttgggcagcagcgaagtcgaggcatttctgtcctggctggcgaacgagcgcaaggtttcggtctccacgcatcgtcaggcattggcggccttgctgttcttctacggcaaggtgctgtgcacggatctgcccttgcttcaggagatcggtagacctcggccgtcgcggcgcttgccggtggtgctgaccccggatgaagtggttcgcatcctcggttttctggaaggcgagcatcgtttgttcgcccaggactctagctatagttctagtggttggctacagctttgtttgtactatcaacaggttgaactgctgatcaacagatcctctacgcggccgcggtaccataacttcgtatagcatacattatacgaagttatctggtttaaacgtacccgtagtggctatggcagggcttgccgccccgacgttggctgcgagccctgggccttcacccgaacttgggggttggggtggggaaaaggaagaaacgcgggcgtattggtcccaatggggtctcggtggggtatcgacagagtgccagccctgggaccgaaccccgcgtttatgaacaaacgacccaacacccgtgcgttttattctgtctttttattgccgtcatagcgcgggttccttccggtattgtctccttccgtgtttcagttagcctcccccatctcccggtaccgcatgctatgcatcagctgctagcaccatggctcgagatcccgggtgatcaagtcttcgtcgagtgattgtaaataaaatgtaatttacagtatagtattttaattaatatacaaatgatttgataataattcttatttaactataatatattgtgttgggttgaattaaaggtccgtatactagtatcgattcgcgacctactccggaatattaatagatcatggagataattaaaatgataaccatctcgcaaataaataagtattttactgttttcgtaacagttttgtaataaaaaaacctataaatattccggattattcataccgtcccaccatcgggcgcggatccgccaccatggaaaactggtccgctctggaactgctgcccaaggtcggaatccctaccgacttcctgacccacgtcaagacctccgctggcgaggaaatgttcgaggctctgaggatctactacggcgacgaccccgagcgttacaacatccacttcgaggctatcttcggcaccttctgcaaccgtctggaatgggtgtacttcctgacttccggcctggctgctgctgctcacgctatcaagttccacgacctgaacaagctgaccaccggcaagatgctgttccacgtgcaagtgccccgtgtggcttccggtgctggcctgcctacctcccgtcagaccaccatcatggtcaccaagtactccgagaagtcccccatcaccatccctttcgagctgtccgctgcttgcctgacttacctgcgtgaaaccttcgagggcaccatcctggacaagatcctgaacgtcgaggctatgcacaccgtgctgcgtgctctgaagaacaccgctgacgctatggaacgtggcctgatccacagcttcctccagaccctgctgaggaaggctcccccctacttcgtggtgcagaccctggtcgagaacgctaccctggctcgtcaggctctgaaccgtatccagcgctccaacatcctgcagtccttcaaggctaagatgctggctaccctgttcctgctgaaccgtacccgtgaccgtgactacgtgctgaagttcctgacccgtctggctgaggctgctaccgactccatcctcgacaaccctactacctacaccacctcctccggtgctaagatctccggtgtcatggtgtccaccgctaacgtgatgcagatcatcatgtccctgctgtcctcccacatcactaaggaaaccgtgtccgctcccgctacctacggcaacttcgtgctgtcccccgagaacgctgtgaccgctatctcctaccactctatcctggctgacttcaactcctacaaggctcacctgacctccggccagccccacctccccaacgactccctgagccaggctggtgctcactccctgacccccctgtccatggacgtgatccgtctgggcgaaaagaccgtgatcatggaaaacctgcgtcgcgtgtacaagaacaccgacaccaaggaccccctggaacgtaacgtggacctgaccttcttcttccccgtgggcctgtacctgcccgaggaccgtggttacaccaccgtcgagtccaaggtcaagctgaacgacaccgtgcgtaacgctctgcccaccaccgcttacctgctgaacagggaccgtgctgtgcaaaagatcgacttcgtggacgctctcaagaccctgtgccaccccgtgctgcacgagcctgctccatgcctgcaggctttcaccgagcgtggtcccccatccgagcccgctatgcagcgtctgctggaatgccgtttccagcaagagcccatgggtggtgctgctcgtcgtatcccccacttctaccgtgtgcgccgcgaggtgccccgtaccgtgaacgagatgaagcaggacttcgtggtcaccgacttctacaaggttggaaacatcaccctgtacaccgagctgcaccctttcttcgacttcacccactgccaagagaactccgagactgtggctctgtgcaccccccgtatcgtgatcggcaacctgcccgacggcctggctcccggtcccttccacgagctgaggacctgggagatcatggaacacatgcgcctgcgtcccccacccgactacgaggaaaccctgcgtctgttcaagaccaccgtgacctcccccaactaccccgagctgtgctacctggtggacgtgctggtgcacggcaacgctgacgctttcctgctgatccgcgctttcatcgctcgttgcatcgtgaacatgttccacacccgtcagctgctggtgttcgctcactcctacgctctggtcaccctgatcgctgagcacctggctgacggtgctctgcccccccagctcctgttccactaccgtaacctggtggctgtgctgcgcctggtcacccgtatctccgctctgcccggcctgaacaacggccagctggctgaggaacccctgtccgcttacgtgaacgctctgcacgaccacaggctgtggccccccttcgtgacccacctccctcgtaacatggaaggtgtccaggtggtggctgatcgtcagcccctgaaccccgctaacatcgaggctcgtcaccacggtgtctccgacgtgccccgtctgggtgctatggacgctgacgagcccctgttcgtggacgactaccgtgctaccgacgacgagtggaccctgcaaaaggtgttctacctgtgcctgatccccgctatgaccaacaaccgtgcttgcggcctgggcctgaacctcaagactctgctggtggacctgttctaccgtcccgccttcctgctcatgcccgctgctaccgctgtgtccacctccggcaccacctccaaggaatccacctctggtgtcacccccgaggactccgtggctgctcagcgtcaggctgtgggcgagatgctgaccgagctggtcgaggacgtggccaccgacgctcacacccctctgctgcaggcttgccgcgagctgttcctggctgtgcagttcgtgggcgagcacgtgaaggtgctggaagtgcgtgctcccctggaccacgctcagaggcagggactgcccgacttcatctcccgtcagcatgtgctgtacaacggttgctgcgtcgtgaccgctcctaagaccctgatcgagtactccctgcccgtgcccttccaccgtttctactccaaccccaccatctgcgctgctctgtccgacgacatcaagcgttacgtgaccgagttcccccactaccatagacacgatggtggtttccccctgcccaccgctttcgctcacgagtaccacaactggctgcgtagccccttctcccgttactccgctacctgccccaacgtgctgcactccgtgatgaccctggctgctatgctgtacaagatctcccccgtgtccctggtgctgcagaccaaggctcacatccaccccggtttcgctctgaccgctgtgcgtaccgacaccttcgaggtggacatgctgctgtactccggcaagtcctgcacctccgtcatcatcaacaaccccatcgtgaccaaggaagagagggacatctccaccacctaccacgtgacccagaacatcaacaccgtggacatgggcctgggttacacctccaacacttgcgtggcctacgtgaaccgcgtccgcaccgacatgggtgtccgtgtgcaggacctgttccgtgtgttccccatgaacgtgtaccgccacgatgaggtggaccgttggatcaggcacgctgctggcgtcgagcgtccccagctgctggacaccgagactatctccatgctgaccttcggttccatgtccgagcgcaacgctgctgctaccgtgcacggccagaaggctgtctgcgagctgatcctgacccctgtgactatggacgtgaactacttcaagatcaccaacaaccctcgtggtcgtgcttcctgcatgctgggcgtggacccctacgacaccgaggctgccaccaaggctatctacgaccaccgcgaggctgacgctcagaccttcgctgctacccacaacccatgggcttcccaggctggttgcctgtccgacgtcctgtacaacacccgtcaccgcgagcgtctgggctacaactccaagttctactccccctgcgctcagtacttcaacaccgaggaaatcatcgctgccaacaagaccctcttcaagaccatcgacgagtacctgctgcgcgctaaggactgcatccgtggcgacaccgacactcagtacgtgtgcgtcgagggaaccgagcagctgatcgagaacccttgccgtctgacccaagaggctctgcccatcctgtccaccaccaccctggctctgatggaaactaagctgaagggtggcgctggtgctttcgctacctccgagactcacttcggcaactacgtcgtgggagagatcatccccctgcagcagtccatgctgttcaacagctaagagctcaagcttgtcgagaagtactagaggatcataatcagccataccacatttgtagaggttttacttgctttaaaaaacctcccacacctccccctgaacctgaaacataaaatgaatgcaattgttgttgttaacttgtttattgcagcttataatggttacaaataaagcaatagcatcacaaatttcacaaataaagcatttttttcactgcattctagttgtggtttgtccaaactcatcaatgtatcttatcatgtctggatctgatcactgcttgagcctagaagatccggctgctaacaaagcccgaaaggaagctgagttggctgctgtggctagctttgtttaactttaagaaggagatacatctagaccggaatattaatagatcatggagataattaaaatgataaccatctcgcaaataaataagtattttactgttttcgtaacagttttgtaataaaaaaacctataaatattccggattattcataccgtcccaccatcgggcgcggatcccggtccgaagcgcgcggaattcaaaggcctacgtcgacgccaccatggaatcccgtggtcgtcgttgccccgagatgatctccgtgctgggtcccatctccggtcacgtcctgaaggctgtgttctcccgtggcgacacccccgtgctgccccacgaaactcgtctgctgcagaccggtatccacgtgcgtgtgtcccagccctccctgatcctggtgtcccagtacacccccgactccaccccttgccaccgcggagacaaccagctgcaggtccagcacacctacttcaccggttccgaggtcgagaacgtgtccgtgaacgtgcacaaccccaccggtcgttccatctgcccctcccaagagcccatgtccatctacgtgtacgctctgcccctgaagatgctgaacatcccctccatcaacgtgcaccactacccctccgctgctgagcgcaagcaccgtcacctccccgtggctgacgctgtgatccacgcttccggcaagcagatgtggcaggctcgtctgaccgtgtccggcctggcttggacccgtcagcagaaccagtggaaggaacccgacgtgtactacacctccgctttcgtgttccccaccaaggacgtggccctgcgtcacgtcgtgtgcgctcacgaactcgtgtgctccatggaaaacacccgtgctaccaagatgcaagtgatcggcgaccagtacgtgaaggtgtacctggaatccttctgcgaggacgtgccctccggcaagctgttcatgcacgtgaccctgggttccgacgtggaagaggacctgaccatgacccgtaacccccagcccttcatgcgtccccacgagcgtaacggtttcaccgtgctgtgccccaagaacatgatcatcaagcccggcaagatctcccacatcatgctggacgtggccttcacctcccacgagcacttcggcctgctgtgccctaagtccatccccggcctgtccatctccggcaacctgctgatgaacggccagcagatcttcctggaagtgcaggctatccgtgaaaccgtcgagctgcgtcagtacgaccctgtggctgctctgttcttcttcgacatcgacctgctgctgcagcgtggtccccagtactccgagcaccccaccttcaccagccagtaccgtatccagggcaagctggaataccgtcacacctgggaccgtcacgacgagggtgctgctcagggcgacgacgacgtgtggacctccggttccgactccgacgaggaactggtcaccaccgagcgcaagaccccccgtgtgaccggtggtggtgctatggctggtgcttccacctccgctggtcgcaagcgcaagtccgcttcctccgctaccgcttgcaccgctggtgtcatgacccgtggtcgcctgaaggctgagtccaccgtggctcccgaagaggacactgacgaggactccgacaacgagatccacaaccccgctgtgttcacctggcccccctggcaggctggtatcctggctcgtaacctggtgcccatggtggctaccgtgcagggccagaacctgaagtaccaagagttcttctgggacgccaacgacatctaccgtatcttcgctgagctggaaggcgtgtggcagcccgctgctcagcccaagcgtcgtcgtcaccgtcaggacgctctgcctggtccctgtatcgcttccacccccaagaagcaccgcggctaaaagcttgtcgagaagtactagaggatcataatcagccataccacatttgtagaggttttacttgctttaaaaaacctcccacacctccccctgaacctgaaacataaaatgaatgcaattgttgttgttaacttgtttattgcagcttataatggttacaaataaagcaatagcatcacaaatttcacaaataaagcatttttttcactgcattctagttgtggtttgtccaaactcatcaatgtatcttatcatgtctggatctgatcactgcttgagcctagaagatccggctgctaacaaagcccgaaaggaagctgagttggctgctgccaccgctgagcaataactatcataaccggaatattaatagatcatggagataattaaaatgataaccatctcgcaaataaataagtattttactgttttcgtaacagttttgtaataaaaaaacctataaatattccggattattcataccgtcccaccatcgggcgcggatcccggtccgaagcgcgcggaattcgccaccatgaccatggacgagcagcagccccaggctgtgacccccgtgtacgtgggcggtttcctggctcgttacgaccagtcccccgacgaggctgagctgctgctgccacgtgacgtggtcgaacactggctgcacgctcagggccagggacagccttccctgtccgtggctctgcccctgaacatcaaccacgacgacaccgctgtcgtgggtcacgtggccgctatgcagtccgtgcgtgacggcctgttctgcctgggttgcgtgacctccccccgtttcctggaaatcgtgcgtcgtgcttccgagaagtccgagctggtgtcccgtggtcccgtgtccccactgcagcccgacaaggtggtcgagttcctgtccggttcctacgctggcctgtccctgtcatcccgtcgttgcgacgacgtcgaggctgctacctccctgagcggctccgagactacccccttcaagcacgtggccctgtgctccgtgggtcgtaggcgtggaaccctggctgtgtacggtcgtgaccccgagtgggtcacccagcgtttccccgacctgaccgctgctgaccgtgacggactgcgtgctcagtggcagcgttgcggttccaccgctgtggacgcttccggcgaccccttccgttccgactcctacggcctgctgggcaactccgtggacgctctgtacatccgcgagcgtctgcccaagctgcgttacgacaagcagctcgtgggtgtcaccgagcgcgagtcctacgtgaaggcttccgtgtcccccgaggctgcttgcgacatcaaggctgcttccgctgagcgttctggcgacagccgctcccaggctgctactcctgctgctggtgctcgtgtgccctccagctccccatccccacctgtcgagcctccctcccccgtgcaacctcctgctctgcctgcttccccctccgtgctgcctgctgagtccagcccctccctgtcaccctctgagcctgctgaggctgcctccatgtcccaccctctgagcgctgctgtgactgctgctaccgctccccctggtgctactgtggctggtgcttcccccgctgtgccttccctggcttggcctcacgacggtgtctacctgcccaaggacgctttcttctccctgctgggcgcttcccgttccgctgctcccgtgatgtaccccggtgctgtggctgctccccccagcgcttcacctgctcctctgcccctgccctcctaccccgcttcctacggtgctcccgtcgtgggttacgaccagctggctgctcgtcacttcgctgactacgtggacccccactaccccggctggggtcgtcgttacgagcccgctccttccctgcacccatcctaccctgtgccccctcctccatcacccgcttactaccgtcgtcgtgactcccccggtggcatggacgagcctccatctggatgggagcgttacgacggttcccaccgtggccagtcccaaaagcagcaccgtcacggtggttccggtggtcacaacaagcgtcgcaaggaagccgctgctgcatcctccagctccgacgaggacctgagcttccccggcgaggctgaacacggtcgtgctcgcaagcgtctgaagtcccacgtgaactccgacggaggtagcggaggccacgctggttccaaccagcagcagcaacagcgctacgacgagctgcgtgacgctatccacgagctgaagcgtgacctgttcgctgctcgccagtcctccaccctgctgtctgctgctctgccagctgccgcttcttcctcccctaccaccaccaccgtgtgcacccctactggcgagctgacctctggtggtggcgagactcccaccgctctgctgtccggtggtgctaaggtggccgagcgtgctcaggctggtgtcgtgaacgcttcctgccgtctggctaccgcttccggttccgaggctgccaccgctggtccctctaccgctggttcctcatcctgcccagcttccgtggtgctggctgccgctgctgctcaagccgccgctgcttcacagtcccccccaaaggatatggtggacctgaaccgtcgtatcttcgtggctgctctgaacaagctcgagtaataaaagcttgtcgagaagtactagaggatcataatcagccataccacatttgtagaggttttacttgctttaaaaaacctcccacacctccccctgaacctgaaacataaaatgaatgcaattgttgttgttaacttgtttattgcagcttataatggttacaaataaagcaatagcatcacaaatttcacaaataaagcatttttttcactgcattctagttgtggtttgtccaaactcatcaatgtatcttatcatgtctggatctgatcactgcttgagcctagaagatccggctgctaacaaagcccgaaaggaagctgggaatattaatagatcatggagataattaaaatgataaccatctcgcaaataaataagtattttactgttttcgtaacagttttgtaataaaaaaacctataaatattccggattattcataccgtcccaccatcgggcgcggatccgccaccatggctgctatggaagctaacatcttctgcaccttcgaccacaagctgtctatcgctgacgtgggcaagctgaccaagctggtggctgctgtggtgcccatcccccagcgtctgcacctgatcaagcactaccagctgggcctgcaccagttcgtggaccacacccgtggttacgtgcgtctgcgtggcctgctgcgtaacatgaccctgaccctgatgcgtcgtgtcgagggcaaccagatcctgctgcacgtgcccacccacggcctgctgtacaccgtgctgaacaccggtcccgtgacctgggagaagggcgacgctctgtgcgtgctgccccccctgttccacggtcccctggctcgtgaaaacctgttgaccctgggccagtgggagctggtgctgccctggatcgtgcccatgcccctggctctggaaatcaaccagcgcctgctgatcatgggcctgttctccctggaccgttcctacgaagaagtgaaggctgctgtccagcagctgcagaccatcaccttccgtgacgctaccttcaccatccccgaccccgtgatcgaccagcacctcctgatcgacatgaagaccgcttgcctgtccatgtccatggtggctaacctggcttccgagctgaccatgacctacgtccgcaagctggctttggaggactcttccatgctgctggtcaagtgccaagagctgctgatgcgtctggaccgcgagcgttccgtgggcgagcctcgtactcccgctcgtcctcagcacgtgtcccccgacgacgagatcgctcgtctgtccgctctgttcgtgatgctgcgtcagctggacgacctgatccgcgagcaggtcgtgttcaccgtgtgcgacgtgagcccagacaacaagtccgctacctgcatcttcaagggctaaggcgcgccaagcttgtcgagaagtactagaggatcataatcagccataccacatttgtagaggttttacttgctttaaaaaacctcccacacctccccctgaacctgaaacataaaatgaatgcaattgttgttgttaacttgtttattgcagcttataatggttacaaataaagcaatagcatcacaaatttcacaaataaagcatttttttcactgcattctagttgtggtttgtccaaactcatcaatgtatcttatcatgtctggatctgatcactgcttgagcctagaagatccggctgctaacaaagcccgaaaggaagctgagttggctgctgccaccgctgagcaataactatcataacccctaggggcctctaaacgggtcttgaggggttttttgctgaaaggaggaactatatccggatctgaacaggagggacagctgatagaaacagaagccactggagcacctcaaaaacaccatcatacactaaatcagtaagttggcagcatcacccgacgcactttgcgccgaataaatacctgtgacggaagatcacttcgcagaataaataaatcctggtgtccctgttgataccgggaagccctgggccaacttttggcgaaaatgagacgttgatcggcacgtaagaggttccaactttcaccataatgaaataagatcactaccgggcgtattttttgagttatcgagattttcaggagctaaggaagctaaaatggagaaaaaaatcactggatataccaccgttgatatatcccaatggcatcgtaaagaacattttgaggcatttcagtcagttgctcaatgtacctataaccagaccgttcagctggatattacggcctttttaaagaccgtaaagaaaaataagcacaagttttatccggcctttattcacattcttgcccgcctgatgaatgctcatccggaattccgtatggcaatgaaagacggtgagctggtgatatgggatagtgttcacccttgttacaccgttttccatgagcaaactgaaacgttttcatcgctctggagtgaataccacgacgatttccggcagtttctacacatatattcgcaagatgtggcgtgttacggtgaaaacctggcctatttccctaaagggtttattgagaatatgtttttcgtctcagccaatccctgggtgagtttcaccagttttgatttaaacgtggccaatatggacaacttcttcgcccccgttttcaccatgggcaaatattatacgcaaggcgacaaggtgctgatgccgctggcgattcaggttcatcatgccgtttgtgatggcttccatgtcggcagaatgcttaatgaattacaacagtactgcgatgagtggcagggcggggcgtaatttttttaaggcagttattggtgcccttaaacgcctggttgctacgcctgaataagtgataataagcggatgaatggcagaaattcgaaagcaaattcgacccggtcgtcggttcagggcagggtcgttaaatagccgcttatgtctattgctggtttaccggtttattgactaccggaagcagtgtgaccgtgtgcttctcaaatgcctgaggccagtttgctcaggctctccccgtggaggtaataattgacgatatgatcatttattctgcctcccagctgacattcatccggggtcagcaccgtttctgcggactggctttctacgtgttccgcttcctttagcagcccttgcgccctgagtgcttgcggcagcgtgaagctaattctgtcagccgttaagtgttcctgtgtcactcaaaattgctttgagaggctctaagggcttctcagtgcgttacatccctggcttgttgtccacaaccgttaaaccttaaaagctttaaaagccttatatattcttttttttcttataaaacttaaaaccttagaggctatttaagttgctgatttatattaattttattgttcaaacatgagagcttagtacgtgaaacatgagagcttagtacgttagccatgagagcttagtacgttagccatgagggtttagttcgttaaacatgagagcttagtacgttaaacatgagagcttagtacgtgaaacatgagagcttagtacgtactatcaacaggttgaactgctgatcaacagatcctctacgcggccgcggtaccataacttcgtatagcatacattatacgaagttatctggtttaaacgtacccgtagtggctatggcagggcttgccgccccgacgttggctgcgagccctgggccttcacccgaacttgggggttggggtggggaaaaggaagaaacgcgggcgtattggtcccaatggggtctcggtggggtatcgacagagtgccagccctgggaccgaaccccgcgtttatgaacaaacgacccaacacccgtgcgttttattctgtctttttattgccgtcatagcgcgggttccttccggtattgtctccttccgtgtttcagttagcctcccccatctcccggtaccgcatgctatgcatcagctgctagcttagcgagcgtccacagcctggggaccgtaacgggagtgagcgggcaggttcacacgggtctgcttcagctcagggggcaggccagcgtagtacttgtccaggtgacgcagcaggggggggtccagctggtgacgcaggcagaattccttcacagcgttgtacaggccgtagaacagggtgataccctcgggagcagcagcggtggacacgggcagacgcacagcacggttggtacgggtagcctcgttacggatagccaccaccacgttgaacagggaggggggcaccagctcgaaacccagcacgtgttcggtgaagatggaacgaccgtaggacagacgagtcaggtcgtaaccacggcacaggtcgtccacgcaagtgtacacagcgggggaaccgtcgccgcactcggagtaaccgcgcatcacggtcatccaacggggagcggtgtcggaggacagcagggtcagcagagcacgcagctggtcggggttgttgtacagcagggccagggtgtccaggaaagcgtcgtccagcagcacggagttagcagcctcgggggtcacgggacggtaacggatcagctgggacaggggaccgtccctacgggtcacgttgaccaggggacgcagccaggactcgtacttgtcgccctggaacacctctcccagcaggcaacgacgggtcagctcggggcactcagcgggcaccttctcagccacggtgggagccacggacacggtagcggaggacacgatgggcagcagcaggcagcaccacagcagagccacgggaccgggggagaaggagaaaccgcagtcgggacgacggcacatggtggctcgagatcccgggtgatcaagtcttcgtcgagtgattgtaaataaaatgtaatttacagtatagtattttaattaatatacaaatgatttgataataattcttatttaactataatatattgtgttgggttgaattaaaggtccgtatactagtatcgattcgcgacctactccggaatattaatagatcatggagataattaaaatgataaccatctcgcaaataaataagtattttactgttttcgtaacagttttgtaataaaaaaacctataaatattccggattattcataccgtcccaccatcgggcgcggatccgccaccatgtcccccaagaacctgacccccttcctgaccgctctgtggctgctgctgggccactcccgtgtgcctcgtgtgcgtgctgaggaatgctgcgagttcatcaacgtgaaccacccccccgagcgctgctacgacttcaagatgtgcaaccgtttcaccgtggctctgcgttgccccgacggcgaagtgtgctactcccccgaaaagaccgctgagatccgtggtatcgtgaccaccatgacccactccctgacccgtcaggtggtgcacaacaagctgacctcttgcaactacaaccccctgtacctcgaggctgacggtcgtatccgttgcggcaaggtcaacgacaaggctcagtacctgctgggtgctgctggttccgtgccctaccgttggatcaacctcgagtacgacaagatcacccgtatcgtgggcctggaccagtacctcgagtccgtgaagaagcacaagcgtctggacgtgtgccgtgctaagatgggttacatgctgcagtaaaagcttgtcgagaagtactagaggatcataatcagccataccacatttgtagaggttttacttgctttaaaaaacctcccacacctccccctgaacctgaaacataaaatgaatgcaattgttgttgttaacttgtttattgcagcttataatggttacaaataaagcaatagcatcacaaatttcacaaataaagcatttttttcactgcattctagttgtggtttgtccaaactcatcaatgtatcttatcatgtctggatctgatcactgcttgagcctagaagatccggctgctaacaaagcccgaaaggaagctgagttggctgctgtggctagctttgtttaactttaagaaggagatacatctagaccggaatattaatagatcatggagataattaaaatgataaccatctcgcaaataaataagtattttactgttttcgtaacagttttgtaataaaaaaacctataaatattccggattattcataccgtcccaccatcgggcgcggatccgccaccatgctgcgtctgctgctgcgtcaccacttccactgcctgctgctgtgcgctgtgtgggctaccccctgcctggcttccccttggtccaccctgaccgctaaccagaacccctccccaccctggtccaagctgacctactccaagccccacgacgctgctaccttctactgccccttcctgtacccatccccccctcgttccccactgcagttctccggtttccagcgtgtgctgaccggtcccgagtgccgtaacgagactctgtacctgctgtacaaccgcgagggccagaccctggtcgagaggtcctccacctgggtcaagaaggtcatctggtacttgtccggtcgtaaccagaccatcctgcagcgtatgccccgtaccgcttccaagccctccgacggcaacgtgcagatctccgtcgaggacgctaagatcttcggtgctcacatggtgcccaagcagaccaagctgctgcgtttcgtggtcaacgacggcacccgttaccagatgtgcgtgatgaagctcgagtcctgggctcacgtgttccgtgactactccgtgtccttccaagtgcgcctgaccttcaccgaggctaacaaccagacctacaccttctgcacccaccccaacctgatcgtgtaaaagcttgtcgagaagtactagaggatcataatcagccataccacatttgtagaggttttacttgctttaaaaaacctcccacacctccccctgaacctgaaacataaaatgaatgcaattgttgttgttaacttgtttattgcagcttataatggttacaaataaagcaatagcatcacaaatttcacaaataaagcatttttttcactgcattctagttgtggtttgtccaaactcatcaatgtatcttatcatgtctggatctgatcactgcttgagcctagaagatccggctgctaacaaagcccgaaaggaagctgagttggctgctgggtgcctaatgagtgagctaactcacattaattgcccggaatattaatagatcatggagataattaaaatgataaccatctcgcaaataaataagtattttactgttttcgtaacagttttgtaataaaaaaacctataaatattccggattattcataccgtcccaccatcgggcgcggatccgccaccatgcgtctgtgccgtgtgtggctgtccgtgtgcctgtgcgctgtggtgctgggccagtgccagcgtgaaaccgctgagaagaacgactactaccgtgtgccccactactgggacgcttgctcccgtgctctgcccgaccagacccgttacaagtacgtcgagcagctggtggacctgaccctgaactaccactacgacgcttcccacggcctggacaacttcgacgtgctgaagcgtatcaacgtgaccgaggtgtccctgctgatctccgacttccgtcgtcagaaccgtcgtggtggcaccaacaagcgtaccaccttcaacgctgctggttccctggctccccacgctcgttccctcgagttctccgtgcgtctgttcgctaactaaaagcttgtcgagaagtactagaggatcataatcagccataccacatttgtagaggttttacttgctttaaaaaacctcccacacctccccctgaacctgaaacataaaatgaatgcaattgttgttgttaacttgtttattgcagcttataatggttacaaataaagcaatagcatcacaaatttcacaaataaagcatttttttcactgcattctagttgtggtttgtccaaactcatcaatgtatcttatcatgtctggatctgatcactgcttgagcctagaagatccggctgctaacaaagcccgaaaggaagctgagttggctgctgccaccgctgagcaataactatcataacccccggaatattaatagatcatggagataattaaaatgataaccatctcgcaaataaataagtattttactgttttcgtaacagttttgtaataaaaaaacctataaatattccggattattcataccgtcccaccatcgggcgcggatcccggtccgaagcgcgcggaattcaaaggcctaccgtcgacgccaccatggaatcccgtatctggtgcctggtcgtgtgcgtgaacctgtgcatcgtgtgcctgggtgctgctgtgtcctcctcctccacccgtggcacctccgctacccactcccaccactcctcccacaccacctccgccgctcactcccgttccggttccgtgtcccagcgtgtgacctcctcccagaccgtgtcccacggtgtcaacgagactatctacaacaccaccctgaagtacggcgacgtcgtgggtgtcaacaccaccaagtacccctaccgtgtgtgctccatggctcagggcaccgacctgatccgtttcgagcgtaacatcgtgtgcacctccatgaagcccatcaacgaggacctggacgagggtatcatggtggtgtacaagcgcaacatcgtggctcacaccttcaaggtccgcgtgtaccagaaggtgctgaccttccgtcgttcctacgcttacatccacaccacttacctgctgggttccaacaccgagtacgtggcccctcccatgtgggagatccaccacatcaactcccactcccagtgctactcctcttactcccgtgtgatcgctggcaccgtgttcgtggcttaccaccgtgactcctacgagaacaagaccatgcagctgatgcccgacgactactccaacacccactccacccgttacgtgaccgtgaaggaccagtggcactcccgtggttccacctggctgtaccgtgaaacctgcaacctgaactgcatggtcaccatcaccaccgctcgttccaagtacccttaccacttcttcgctacctccaccggcgacgtggtggacatctcccccttctacaacggtactaaccgtaacgcttcctacttcggcgagaacgctgacaagttcttcatcttccccaactacaccatcgtgtccgacttcggtcgtcccaactccgctctggaaacccaccgtctggtggctttcttggagcgtgctgactccgtgatctcctgggacatccaggacgagaagaacgtgacctgccagctgaccttctgggaggcttccgagcgtaccatccgttccgaggctgaggactcctaccacttctccagcgctaagatgaccgctaccttcctgtccaagaaacaagaggtcaacatgtccgactccgccctggactgcgtgcgtgacgaggctatcaacaagctgcagcagatcttcaacacctcctacaaccagacctacgagaagtacggaaacgtgtccgtgttcgagactaccggtggcctggtggtgttctggcagggtatcaagcagaagtccctggtcgagctggaacgtctggctaaccgttcctccctgaacctgacccacaaccgtaccaagcgttccaccgacggcaacaacgctactcacctgtccaacatggaatccgtgcacaacctggtgtacgctcagctgcagttcacctacgacaccctgcgcggttacatcaaccgtgctctggctcagatcgctgaggcttggtgcgtggaccagcgtcgtaccctggaagtgttcaaggaactgtccaagatcaacccctccgctatcctgtccgccatctacaacaagcctatcgctgctcgtttcatgggcgacgtgctgggcctggcttcctgcgtgaccatcaaccagacttccgtgaaggtgctgcgtgacatgaacgtgaaggaatcccccggtcgttgctactcccgtcccgtggtcatcttcaacttcgctaactcctcctacgtgcagtacggccagctgggcgaggacaacgagatcctgctgggcaaccaccgtaccgaggaatgccagctgccctccctgaagatcttcatcgctggcaactccgcttacgaatacgtggactacctgttcaagcgcatgatcgacctgtcctccatctctaccgtggactccatgatcgctctggacatcgaccccctggaaaacaccgacttccgtgtgctggaactgtactcccagaaggaactgcgttccatcaacgtgttcgacctggaagagatcatgcgcgagttcaactcctacaagcagcgtgttaagtacgtcgaggacaaggtggtggaccccctgcccccctacctgaagggactggacgacctgatgtccggcctgggagctgccggcaaggctgtgggtgtcgctatcggtgctgtgggtggtgctgtggcttccgtggtcgagggtgtcgccaccttcctgaagaaccccttcggtgctttcaccatcatcctggtggctatcgctgtggtcatcatcatctacctgatctacacccgtcagcgtcgtctgtgcatgcagcccctgcagaacctgttcccctacctggtgtccgctgacggtactaccgtgacctccggcaacaccaaggacacctccctgcaggctcccccatcctacgaggaatccgtctacaactccggtcgcaagggtcccggtcccccttcctccgacgcttctaccgctgctcccccatacaccaacgagcaggcttaccagatgctgctggctctcgtgcgtctggacgctgagcagcgtgcacagcagaacggcaccgactccctggacggccagaccggaacccaggacaagggccagaagcccaacctgctggaccgtctgcgtcaccgcaagaacggttaccgtcacctgaaggactccgacgaggaagagaacgtctaaggcgcgccaagcttgtcgagaagtactagagatcataatcagccataccacatttgtagaggttttacttgctttaaaaaacctcccacacctccccctgaacctgaaacataaaatgaatgcaattgttgttgttaacttgtttattgcagcttataatggttacaaataaagcaatagcatcacaaatttcacaaataaagcatttttttcactgcattctagttgtggtttgtccaaactcatcaatgtatcttatcatgtctggatctgatcactgcttgagcctagaagatccggctgctaacaaagcccgaaaggaagctgggaatattaatagatcatggagataattaaaatgataaccatctcgcaaataaataagtattttactgttttcgtaacagttttgtaataaaaaaacctataaatattccggattattcataccgtcccaccatcgggcgcggatccgccaccatgcgtcccggcctgccctcctacctgatcgtgctggctgtgtgcctgctgtcccacctcctgtcctcccgttacggtgctgaggctatctccgagcccctggacaaggctttccacctcctgctgaacacctacggtcgtcctatccgtttcctgcgcgagaacaccacccagtgcacctacaactcctccctgcgcaactccaccgtcgtccgcgagaacgctatctccttcaacttcttccagtcctacaaccagtactacgtgttccacatgccccgttgcctgttcgctggtcccctggctgagcagttcctgaaccaggtggacctgaccgagactctcgagcgttaccagcagcgtctgaacacttacgctctggtgtccaaggacctggcttcctaccgttccttcagccagcagctgaaggctcaggactccctgggcgagcagcccaccactgtgcctccccctatcgacctgtccatcccccacgtgtggatgcccccccagaccactcctcacggctggaccgagtcccacaccacctccggactgcaccgtccccacttcaaccagacctgcatcctgttcgacggtcacgacctgctgttctccaccgtgaccccctgcctgcaccagggcttctacctcatcgacgagctgcgttacgtgaagatcaccctgaccgaggatttcttcgtggtcaccgtgtccatcgacgacgacacccccatgctgctgatcttcggtcacctcccccgtgtgctgttcaaggctccctaccagcgtgacaacttcatcctgcgtcagaccgagaagcacgagctgctggtgctggtcaagaaggaccagctgaaccgtcactcttacctgaaggaccccgacttcctggacgctgctctggacttcaactacctggacctgtccgctctgctgaggaactccttccaccgttacgctgtggacgtgctgaagtccggtcgttgccagatgctggaccgtcgtaccgtcgagatggctttcgcttacgccctggctctgttcgctgctgctcgtcaagaagaggctggcgctcaggtgtccgtgccccgtgctctggaccgtcaggctgctctgctgcagatccaagagttcatgatcacttgcctgtcccagaccccccctcgtaccaccctgctgctgtaccccaccgctgtggacctggctaagcgtgctctgtggacccccaaccagatcaccgacatcacctccctcgtgcgtctggtgtacatcctgtccaagcagaaccagcagcacctgatcccccagtgggctctgcgtcagatcgctgacttcgctctgaagctgcacaagacccacctggcttcattcctcagcgctttcgctcgccaagagctgtacctgatgggttccctggtgcactccatgctggtgcacaccaccgagcgtcgcgagatcttcatcgtggaaaccggcctgtgctccctggccgagctgtcccacttcacccagctgctggctcacccccaccacgagtacctgtccgacctgtacaccccctgctcctcttccggtcgtcgtgaccactccctggaacgtctgacccgtctgttccccgacgctaccgtgcctaccaccgtgcctgctgctctgtccatcctgtctaccatgcagccctccaccctggaaaccttccccgacctgttctgcctgcctctgggcgagtccttctccgctctgaccgtgtccgagcacgtgtcctacgtggtcaccaaccagtacctgatcaagggcatctcctaccccgtgtccaccaccgtcgtgggccagtccctgatcatcacccagaccgactcccagaccaagtgcgagctgacccgtaacatgcacaccactcactccatcaccgctgctctgaacatctccctcgagaactgcgctttctgccagtccgctctgttggagtacgacgacactcagggtgtcatcaacatcatgtacatgcacgactccgacgacgtgctgttcgctctggacccctacaacgaggtggtggtgtcctccccccgtacccactacctgatgctgctgaagaacggcaccgtgctggaagtgaccgacgtggtggtggacgctaccgaccgtctgctgatgatgtccgtgtacgctctgtccgctatcatcggcatctacctgctgtaccgtatgctgaagacctgctaaggcgccaagctttgtcgagaagtactagaggatcataatcagccataccacatttgtagaggttttacttgctttaaaaaacctcccacacctccccctgaacctgaaacataaaatgaatgcaattgttgttgttaacttgtttattgcagcttataatggttacaaataaagcaatagcatcacaaatttcacaaataaagcatttttttcactgcattctagttgtggtttgtccaaactcatcaatgtatcttatcatgtctggatctgatcactgcttgagcctagaagatccggctgctaacaaagcccgaaaggaagctgagttggctgctgccaccgctgagcaataactatcataacccctaggagatccgaaccagataagtgaaatctagttccaaactattttgtcatttttaattttcgtattagcttacgacgctacacccagttcccatctattttgtcactcttccctaaataatccttaaaaactccatttccacccctcccagttcccaactattttgtccgcccaca

SEQ ID NO: 43 - DNA, 25991 bp, Artificial Sequence
  Synthetic construct
ttgttccagtttggaacaagagtccactattaaagaacgtggactccaacgtcaaagggcgaaaaaccgtctatcagggcgatggcccactacgtgaaccatcaccctaatcaagttttttggggtcgaggtgccgtaaagcactaaatcggaaccctaaagggagcccccgatttagagcttgacggggaaagccggcgaacgtggcgagaaaggaagggaagaaagcgaaaggagcgggcgctagggcgctggcaagtgtagcggtcacgctgcgcgtaaccaccacacccgccgcgcttaatgcgccgctacagggcgcgtccattcgccattcaggctgcgcaactgttgggaagggcgatcggtgcgggcctcttcgctattacgccagctggcgaaagggggatgtgctgcaaggcgattaagttgggtaacgccagggttttcccagtcacgacgttgtaaaacgacggccagtgcatagaccagccgcgtaacctggcaaaatcggttacggttgagtaataaatggatgccctgcgtaagcgggtgtgggcggacaataaagtcttaaactgaacaaaatagatctaaactatgacaataaagtcttaaactagacagaatagttgtaaactgaaatcagtccagttatgctgtgaaaaagcatactggacttttgttatggctaaagcaaactcttcattttctgaagtgcaaattgcccgtcgtattaaagaggggcgtggccaagggcatggtaaagactatattcgcggcgttgtgacaatttaccgaacaactccgcggccgggaagccgatctcggcttgaacgaattgttaggtggcggtacttgggtcgatatcaaagtgcatcacttcttcccgtatgcccaactttgtatagagagccactgcgggatcgtcaccgtaatctgcttgcacgtagatcacataagcaccaagcgcgttggcctcatgcttgaggagattgatgagcgcggtggcaatgccctgcctccggtgctcgccggagactgcgagatcatagatatagatctcactacgcggctgctcaaacttgggcagaacgtaagccgcgagagcgccaacaaccgcttcttggtcgaaggcagcaagcgcgatgaatgtcttactacggagcaagttcccgaggtaatcggagtccggctgatgttgggagtaggtggctacgtctccgaactcacgaccgaaaagatcaagagcagcccgcatggatttgacttggtcagggccgagcctacatgtgcgaatgatgcccatacttgagccacctaactttgttttagggcgactgccctgctgcgtaacatcgttgctgctgcgtaacatcgttgctgctccataacatcaaacatcgacccacggcgtaacgcgcttgctgcttggatgcccgaggcatagactgtacaaaaaaacagtcataacaagccatgaaaaccgccactgcgccgttaccaccgctgcgttcggtcaaggttctggaccagttgcgtgagcgcatacgctacttgcattacagtttacgaaccgaacaggcttatgtcaactgggtttgtgccttcatccgtttccacggtgtgcgtcacccggcaaccttgggcagcagcgaagtcgaggcatttctgtcctggctggcgaacgagcgcaaggtttcggtctccacgcatcgtcaggcattggcggccttgctgttcttctacggcaaggtgctgtgcacggatctgcccttgcttcaggagatcggtagacctcggccgtcgcggcgcttgccggtggtgctgaccccggatgaagtggttcgcatcctcggttttctggaaggcgagcatcgtttgttcgcccaggactctagctatagttctagtggttggctacagctttgtttgtactatcaacaggttgaactgctgatcaacagatcctctacgcggccgcggtaccataacttcgtatagcatacattatacgaagttatctggtttaaacgtacccgtagtggctatggcagggcttgccgccccgacgttggctgcgagccctgggccttcacccgaacttgggggttggggtggggaaaaggaagaaacgcgggcgtattggtcccaatggggtctcggtggggtatcgacagagtgccagccctgggaccgaaccccgcgtttatgaacaaacgacccaacacccgtgcgttttattctgtctttttattgccgtcatagcgcgggttccttccggtattgtctccttccgtgtttcagttagcctcccccatctcccggtaccgcatgctatgcatcagctgctagcaccatggctcgagatcccgggtgatcaagtcttcgtcgagtgattgtaaataaaatgtaatttacagtatagtattttaattaatatacaaatgatttgataataattcttatttaactataatatattgtgttgggttgaattaaaggtccgtatactagtatcgattcgcgacctactccggaatattaatagatcatggagataattaaaatgataaccatctcgcaaataaataagtattttactgttttcgtaacagttttgtaataaaaaaacctataaatattccggattattcataccgtcccaccatcgggcgcggatccgccaccatggaaaactggtccgctctggaactgctgcccaaggtcggaatccctaccgacttcctgacccacgtcaagacctccgctggcgaggaaatgttcgaggctctgaggatctactacggcgacgaccccgagcgttacaacatccacttcgaggctatcttcggcaccttctgcaaccgtctggaatgggtgtacttcctgacttccggcctggctgctgctgctcacgctatcaagttccacgacctgaacaagctgaccaccggcaagatgctgttccacgtgcaagtgccccgtgtggcttccggtgctggcctgcctacctcccgtcagaccaccatcatggtcaccaagtactccgagaagtcccccatcaccatccctttcgagctgtccgctgcttgcctgacttacctgcgtgaaaccttcgagggcaccatcctggacaagatcctgaacgtcgaggctatgcacaccgtgctgcgtgctctgaagaacaccgctgacgctatggaacgtggcctgatccacagcttcctccagaccctgctgaggaaggctcccccctacttcgtggtgcagaccctggtcgagaacgctaccctggctcgtcaggctctgaaccgtatccagcgctccaacatcctgcagtccttcaaggctaagatgctggctaccctgttcctgctgaaccgtacccgtgaccgtgactacgtgctgaagttcctgacccgtctggctgaggctgctaccgactccatcctcgacaaccctactacctacaccacctcctccggtgctaagatctccggtgtcatggtgtccaccgctaacgtgatgcagatcatcatgtccctgctgtcctcccacatcactaaggaaaccgtgtccgctcccgctacctacggcaacttcgtgctgtcccccgagaacgctgtgaccgctatctcctaccactctatcctggctgacttcaactcctacaaggctcacctgacctccggccagccccacctccccaacgactccctgagccaggctggtgctcactccctgacccccctgtccatggacgtgatccgtctgggcgaaaagaccgtgatcatggaaaacctgcgtcgcgtgtacaagaacaccgacaccaaggaccccctggaacgtaacgtggacctgaccttcttcttccccgtgggcctgtacctgcccgaggaccgtggttacaccaccgtcgagtccaaggtcaagctgaacgacaccgtgcgtaacgctctgcccaccaccgcttacctgctgaacagggaccgtgctgtgcaaaagatcgacttcgtggacgctctcaagaccctgtgccaccccgtgctgcacgagcctgctccatgcctgcaggctttcaccgagcgtggtcccccatccgagcccgctatgcagcgtctgctggaatgccgtttccagcaagagcccatgggtggtgctgctcgtcgtatcccccacttctaccgtgtgcgccgcgaggtgccccgtaccgtgaacgagatgaagcaggacttcgtggtcaccgacttctacaaggttggaaacatcaccctgtacaccgagctgcaccctttcttcgacttcacccactgccaagagaactccgagactgtggctctgtgcaccccccgtatcgtgatcggcaacctgcccgacggcctggctcccggtcccttccacgagctgaggacctgggagatcatggaacacatgcgcctgcgtcccccacccgactacgaggaaaccctgcgtctgttcaagaccaccgtgacctcccccaactaccccgagctgtgctacctggtggacgtgctggtgcacggcaacgctgacgctttcctgctgatccgcgctttcatcgctcgttgcatcgtgaacatgttccacacccgtcagctgctggtgttcgctcactcctacgctctggtcaccctgatcgctgagcacctggctgacggtgctctgcccccccagctcctgttccactaccgtaacctggtggctgtgctgcgcctggtcacccgtatctccgctctgcccggcctgaacaacggccagctggctgaggaacccctgtccgcttacgtgaacgctctgcacgaccacaggctgtggccccccttcgtgacccacctccctcgtaacatggaaggtgtccaggtggtggctgatcgtcagcccctgaaccccgctaacatcgaggctcgtcaccacggtgtctccgacgtgccccgtctgggtgctatggacgctgacgagcccctgttcgtggacgactaccgtgctaccgacgacgagtggaccctgcaaaaggtgttctacctgtgcctgatccccgctatgaccaacaaccgtgcttgcggcctgggcctgaacctcaagactctgctggtggacctgttctaccgtcccgccttcctgctcatgcccgctgctaccgctgtgtccacctccggcaccacctccaaggaatccacctctggtgtcacccccgaggactccgtggctgctcagcgtcaggctgtgggcgagatgctgaccgagctggtcgaggacgtggccaccgacgctcacacccctctgctgcaggcttgccgcgagctgttcctggctgtgcagttcgtgggcgagcacgtgaaggtgctggaagtgcgtgctcccctggaccacgctcagaggcagggactgcccgacttcatctcccgtcagcatgtgctgtacaacggttgctgcgtcgtgaccgctcctaagaccctgatcgagtactccctgcccgtgcccttccaccgtttctactccaaccccaccatctgcgctgctctgtccgacgacatcaagcgttacgtgaccgagttcccccactaccatagacacgatggtggtttccccctgcccaccgctttcgctcacgagtaccacaactggctgcgtagccccttctcccgttactccgctacctgccccaacgtgctgcactccgtgatgaccctggctgctatgctgtacaagatctcccccgtgtccctggtgctgcagaccaaggctcacatccaccccggtttcgctctgaccgctgtgcgtaccgacaccttcgaggtggacatgctgctgtactccggcaagtcctgcacctccgtcatcatcaacaaccccatcgtgaccaaggaagagagggacatctccaccacctaccacgtgacccagaacatcaacaccgtggacatgggcctgggttacacctccaacacttgcgtggcctacgtgaaccgcgtccgcaccgacatgggtgtccgtgtgcaggacctgttccgtgtgttccccatgaacgtgtaccgccacgatgaggtggaccgttggatcaggcacgctgctggcgtcgagcgtccccagctgctggacaccgagactatctccatgctgaccttcggttccatgtccgagcgcaacgctgctgctaccgtgcacggccagaaggctgtctgcgagctgatcctgacccctgtgactatggacgtgaactacttcaagatcaccaacaaccctcgtggtcgtgcttcctgcatgctgggcgtggacccctacgacaccgaggctgccaccaaggctatctacgaccaccgcgaggctgacgctcagaccttcgctgctacccacaacccatgggcttcccaggctggttgcctgtccgacgtcctgtacaacacccgtcaccgcgagcgtctgggctacaactccaagttctactccccctgcgctcagtacttcaacaccgaggaaatcatcgctgccaacaagaccctcttcaagaccatcgacgagtacctgctgcgcgctaaggactgcatccgtggcgacaccgacactcagtacgtgtgcgtcgagggaaccgagcagctgatcgagaacccttgccgtctgacccaagaggctctgcccatcctgtccaccaccaccctggctctgatggaaactaagctgaagggtggcgctggtgctttcgctacctccgagactcacttcggcaactacgtcgtgggagagatcatccccctgcagcagtccatgctgttcaacagctaagagctcaagcttgtcgagaagtactagaggatcataatcagccataccacatttgtagaggttttacttgctttaaaaaacctcccacacctccccctgaacctgaaacataaaatgaatgcaattgttgttgttaacttgtttattgcagcttataatggttacaaataaagcaatagcatcacaaatttcacaaataaagcatttttttcactgcattctagttgtggtttgtccaaactcatcaatgtatcttatcatgtctggatctgatcactgcttgagcctagaagatccggctgctaacaaagcccgaaaggaagctgagttggctgctgtggctagctttgtttaactttaagaaggagatacatctagaccggaatattaatagatcatggagataattaaaatgataaccatctcgcaaataaataagtattttactgttttcgtaacagttttgtaataaaaaaacctataaatattccggattattcataccgtcccaccatcgggcgcggatcccggtccgaagcgcgcggaattcaaaggcctacgtcgacgccaccatggaatcccgtggtcgtcgttgccccgagatgatctccgtgctgggtcccatctccggtcacgtcctgaaggctgtgttctcccgtggcgacacccccgtgctgccccacgaaactcgtctgctgcagaccggtatccacgtgcgtgtgtcccagccctccctgatcctggtgtcccagtacacccccgactccaccccttgccaccgcggagacaaccagctgcaggtccagcacacctacttcaccggttccgaggtcgagaacgtgtccgtgaacgtgcacaaccccaccggtcgttccatctgcccctcccaagagcccatgtccatctacgtgtacgctctgcccctgaagatgctgaacatcccctccatcaacgtgcaccactacccctccgctgctgagcgcaagcaccgtcacctccccgtggctgacgctgtgatccacgcttccggcaagcagatgtggcaggctcgtctgaccgtgtccggcctggcttggacccgtcagcagaaccagtggaaggaacccgacgtgtactacacctccgctttcgtgttccccaccaaggacgtggccctgcgtcacgtcgtgtgcgctcacgaactcgtgtgctccatggaaaacacccgtgctaccaagatgcaagtgatcggcgaccagtacgtgaaggtgtacctggaatccttctgcgaggacgtgccctccggcaagctgttcatgcacgtgaccctgggttccgacgtggaagaggacctgaccatgacccgtaacccccagcccttcatgcgtccccacgagcgtaacggtttcaccgtgctgtgccccaagaacatgatcatcaagcccggcaagatctcccacatcatgctggacgtggccttcacctcccacgagcacttcggcctgctgtgccctaagtccatccccggcctgtccatctccggcaacctgctgatgaacggccagcagatcttcctggaagtgcaggctatccgtgaaaccgtcgagctgcgtcagtacgaccctgtggctgctctgttcttcttcgacatcgacctgctgctgcagcgtggtccccagtactccgagcaccccaccttcaccagccagtaccgtatccagggcaagctggaataccgtcacacctgggaccgtcacgacgagggtgctgctcagggcgacgacgacgtgtggacctccggttccgactccgacgaggaactggtcaccaccgagcgcaagaccccccgtgtgaccggtggtggtgctatggctggtgcttccacctccgctggtcgcaagcgcaagtccgcttcctccgctaccgcttgcaccgctggtgtcatgacccgtggtcgcctgaaggctgagtccaccgtggctcccgaagaggacactgacgaggactccgacaacgagatccacaaccccgctgtgttcacctggcccccctggcaggctggtatcctggctcgtaacctggtgcccatggtggctaccgtgcagggccagaacctgaagtaccaagagttcttctgggacgccaacgacatctaccgtatcttcgctgagctggaaggcgtgtggcagcccgctgctcagcccaagcgtcgtcgtcaccgtcaggacgctctgcctggtccctgtatcgcttccacccccaagaagcaccgcggctaaaagcttgtcgagaagtactagaggatcataatcagccataccacatttgtagaggttttacttgctttaaaaaacctcccacacctccccctgaacctgaaacataaaatgaatgcaattgttgttgttaacttgtttattgcagcttataatggttacaaataaagcaatagcatcacaaatttcacaaataaagcatttttttcactgcattctagttgtggtttgtccaaactcatcaatgtatcttatcatgtctggatctgatcactgcttgagcctagaagatccggctgctaacaaagcccgaaaggaagctgagttggctgctgccaccgctgagcaataactatcataaccggaatattaatagatcatggagataattaaaatgataaccatctcgcaaataaataagtattttactgttttcgtaacagttttgtaataaaaaaacctataaatattccggattattcataccgtcccaccatcgggcgcggatcccggtccgaagcgcgcggaattcgccaccatgaccatggacgagcagcagccccaggctgtgacccccgtgtacgtgggcggtttcctggctcgttacgaccagtcccccgacgaggctgagctgctgctgccacgtgacgtggtcgaacactggctgcacgctcagggccagggacagccttccctgtccgtggctctgcccctgaacatcaaccacgacgacaccgctgtcgtgggtcacgtggccgctatgcagtccgtgcgtgacggcctgttctgcctgggttgcgtgacctccccccgtttcctggaaatcgtgcgtcgtgcttccgagaagtccgagctggtgtcccgtggtcccgtgtccccactgcagcccgacaaggtggtcgagttcctgtccggttcctacgctggcctgtccctgtcatcccgtcgttgcgacgacgtcgaggctgctacctccctgagcggctccgagactacccccttcaagcacgtggccctgtgctccgtgggtcgtaggcgtggaaccctggctgtgtacggtcgtgaccccgagtgggtcacccagcgtttccccgacctgaccgctgctgaccgtgacggactgcgtgctcagtggcagcgttgcggttccaccgctgtggacgcttccggcgaccccttccgttccgactcctacggcctgctgggcaactccgtggacgctctgtacatccgcgagcgtctgcccaagctgcgttacgacaagcagctcgtgggtgtcaccgagcgcgagtcctacgtgaaggcttccgtgtcccccgaggctgcttgcgacatcaaggctgcttccgctgagcgttctggcgacagccgctcccaggctgctactcctgctgctggtgctcgtgtgccctccagctccccatccccacctgtcgagcctccctcccccgtgcaacctcctgctctgcctgcttccccctccgtgctgcctgctgagtccagcccctccctgtcaccctctgagcctgctgaggctgcctccatgtcccaccctctgagcgctgctgtgactgctgctaccgctccccctggtgctactgtggctggtgcttcccccgctgtgccttccctggcttggcctcacgacggtgtctacctgcccaaggacgctttcttctccctgctgggcgcttcccgttccgctgctcccgtgatgtaccccggtgctgtggctgctccccccagcgcttcacctgctcctctgcccctgccctcctaccccgcttcctacggtgctcccgtcgtgggttacgaccagctggctgctcgtcacttcgctgactacgtggacccccactaccccggctggggtcgtcgttacgagcccgctccttccctgcacccatcctaccctgtgccccctcctccatcacccgcttactaccgtcgtcgtgactcccccggtggcatggacgagcctccatctggatgggagcgttacgacggttcccaccgtggccagtcccaaaagcagcaccgtcacggtggttccggtggtcacaacaagcgtcgcaaggaagccgctgctgcatcctccagctccgacgaggacctgagcttccccggcgaggctgaacacggtcgtgctcgcaagcgtctgaagtcccacgtgaactccgacggaggtagcggaggccacgctggttccaaccagcagcagcaacagcgctacgacgagctgcgtgacgctatccacgagctgaagcgtgacctgttcgctgctcgccagtcctccaccctgctgtctgctgctctgccagctgccgcttcttcctcccctaccaccaccaccgtgtgcacccctactggcgagctgacctctggtggtggcgagactcccaccgctctgctgtccggtggtgctaaggtggccgagcgtgctcaggctggtgtcgtgaacgcttcctgccgtctggctaccgcttccggttccgaggctgccaccgctggtccctctaccgctggttcctcatcctgcccagcttccgtggtgctggctgccgctgctgctcaagccgccgctgcttcacagtcccccccaaaggatatggtggacctgaaccgtcgtatcttcgtggctgctctgaacaagctcgagtaataaaagcttgtcgagaagtactagaggatcataatcagccataccacatttgtagaggttttacttgctttaaaaaacctcccacacctccccctgaacctgaaacataaaatgaatgcaattgttgttgttaacttgtttattgcagcttataatggttacaaataaagcaatagcatcacaaatttcacaaataaagcatttttttcactgcattctagttgtggtttgtccaaactcatcaatgtatcttatcatgtctggatctgatcactgcttgagcctagaagatccggctgctaacaaagcccgaaaggaagctgggaatattaatagatcatggagataattaaaatgataaccatctcgcaaataaataagtattttactgttttcgtaacagttttgtaataaaaaaacctataaatattccggattattcataccgtcccaccatcgggcgcggatccgccaccatggctgctatggaagctaacatcttctgcaccttcgaccacaagctgtctatcgctgacgtgggcaagctgaccaagctggtggctgctgtggtgcccatcccccagcgtctgcacctgatcaagcactaccagctgggcctgcaccagttcgtggaccacacccgtggttacgtgcgtctgcgtggcctgctgcgtaacatgaccctgaccctgatgcgtcgtgtcgagggcaaccagatcctgctgcacgtgcccacccacggcctgctgtacaccgtgctgaacaccggtcccgtgacctgggagaagggcgacgctctgtgcgtgctgccccccctgttccacggtcccctggctcgtgaaaacctgttgaccctgggccagtgggagctggtgctgccctggatcgtgcccatgcccctggctctggaaatcaaccagcgcctgctgatcatgggcctgttctccctggaccgttcctacgaagaagtgaaggctgctgtccagcagctgcagaccatcaccttccgtgacgctaccttcaccatccccgaccccgtgatcgaccagcacctcctgatcgacatgaagaccgcttgcctgtccatgtccatggtggctaacctggcttccgagctgaccatgacctacgtccgcaagctggctttggaggactcttccatgctgctggtcaagtgccaagagctgctgatgcgtctggaccgcgagcgttccgtgggcgagcctcgtactcccgctcgtcctcagcacgtgtcccccgacgacgagatcgctcgtctgtccgctctgttcgtgatgctgcgtcagctggacgacctgatccgcgagcaggtcgtgttcaccgtgtgcgacgtgagcccagacaacaagtccgctacctgcatcttcaagggctaaggcgcgccaagcttgtcgagaagtactagaggatcataatcagccataccacatttgtagaggttttacttgctttaaaaaacctcccacacctccccctgaacctgaaacataaaatgaatgcaattgttgttgttaacttgtttattgcagcttataatggttacaaataaagcaatagcatcacaaatttcacaaataaagcatttttttcactgcattctagttgtggtttgtccaaactcatcaatgtatcttatcatgtctggatctgatcactgcttgagcctagaagatccggctgctaacaaagcccgaaaggaagctgagttggctgctgccaccgctgagcaataactatcataacccctaggggcctctaaacgggtcttgaggggttttttgctgaaaggaggaactatatccggatctgaacaggagggacagctgatagaaacagaagccactggagcacctcaaaaacaccatcatacactaaatcagtaagttggcagcatcacccgacgcactttgcgccgaataaatacctgtgacggaagatcacttcgcagaataaataaatcctggtgtccctgttgataccgggaagccctgggccaacttttggcgaaaatgagacgttgatcggcacgtaagaggttccaactttcaccataatgaaataagatcactaccgggcgtattttttgagttatcgagattttcaggagctaaggaagctaaaatggagaaaaaaatcactggatataccaccgttgatatatcccaatggcatcgtaaagaacattttgaggcatttcagtcagttgctcaatgtacctataaccagaccgttcagctggatattacggcctttttaaagaccgtaaagaaaaataagcacaagttttatccggcctttattcacattcttgcccgcctgatgaatgctcatccggaattccgtatggcaatgaaagacggtgagctggtgatatgggatagtgttcacccttgttacaccgttttccatgagcaaactgaaacgttttcatcgctctggagtgaataccacgacgatttccggcagtttctacacatatattcgcaagatgtggcgtgttacggtgaaaacctggcctatttccctaaagggtttattgagaatatgtttttcgtctcagccaatccctgggtgagtttcaccagttttgatttaaacgtggccaatatggacaacttcttcgcccccgttttcaccatgggcaaatattatacgcaaggcgacaaggtgctgatgccgctggcgattcaggttcatcatgccgtttgtgatggcttccatgtcggcagaatgcttaatgaattacaacagtactgcgatgagtggcagggcggggcgtaatttttttaaggcagttattggtgcccttaaacgcctggttgctacgcctgaataagtgataataagcggatgaatggcagaaattcgaaagcaaattcgacccggtcgtcggttcagggcagggtcgttaaatagccgcttatgtctattgctggtttaccggtttattgactaccggaagcagtgtgaccgtgtgcttctcaaatgcctgaggccagtttgctcaggctctccccgtggaggtaataattgacgatatgatcatttattctgcctcccagctgacattcatccggggtcagcaccgtttctgcggactggctttctacgtgttccgcttcctttagcagcccttgcgccctgagtgcttgcggcagcgtgaagctaattctgtcagccgttaagtgttcctgtgtcactcaaaattgctttgagaggctctaagggcttctcagtgcgttacatccctggcttgttgtccacaaccgttaaaccttaaaagctttaaaagccttatatattcttttttttcttataaaacttaaaaccttagaggctatttaagttgctgatttatattaattttattgttcaaacatgagagcttagtacgtgaaacatgagagcttagtacgttagccatgagagcttagtacgttagccatgagggtttagttcgttaaacatgagagcttagtacgttaaacatgagagcttagtacgtgaaacatgagagcttagtacgtactatcaacaggttgaactgctgatcaacagatcctctacgcggccgcggtaccataacttcgtatagcatacattatacgaagttatctggtttaaacgtacccgtagtggctatggcagggcttgccgccccgacgttggctgcgagccctgggccttcacccgaacttgggggttggggtggggaaaaggaagaaacgcgggcgtattggtcccaatggggtctcggtggggtatcgacagagtgccagccctgggaccgaaccccgcgtttatgaacaaacgacccaacacccgtgcgttttattctgtctttttattgccgtcatagcgcgggttccttccggtattgtctccttccgtgtttcagttagcctcccccatctcccggtaccgcatgctatgcatcagctgctagcttagcgagcgtccacagcctggggaccgtaacgggagtgagcgggcaggttcacacgggtctgcttcagctcagggggcaggccagcgtagtacttgtccaggtgacgcagcaggggggggtccagctggtgacgcaggcagaattccttcacagcgttgtacaggccgtagaacagggtgataccctcgggagcagcagcggtggacacgggcagacgcacagcacggttggtacgggtagcctcgttacggatagccaccaccacgttgaacagggaggggggcaccagctcgaaacccagcacgtgttcggtgaagatggaacgaccgtaggacagacgagtcaggtcgtaaccacggcacaggtcgtccacgcaagtgtacacagcgggggaaccgtcgccgcactcggagtaaccgcgcatcacggtcatccaacggggagcggtgtcggaggacagcagggtcagcagagcacgcagctggtcggggttgttgtacagcagggccagggtgtccaggaaagcgtcgtccagcagcacggagttagcagcctcgggggtcacgggacggtaacggatcagctgggacaggggaccgtccctacgggtcacgttgaccaggggacgcagccaggactcgtacttgtcgccctggaacacctctcccagcaggcaacgacgggtcagctcggggcactcagcgggcaccttctcagccacggtgggagccacggacacggtagcggaggacacgatgggcagcagcaggcagcaccacagcagagccacgggaccgggggagaaggagaaaccgcagtcgggacgacggcacatggtggctcgagatcccgggtgatcaagtcttcgtcgagtgattgtaaataaaatgtaatttacagtatagtattttaattaatatacaaatgatttgataataattcttatttaactataatatattgtgttgggttgaattaaaggtccgtatactagtatcgattcgcgacctactccggaatattaatagatcatggagataattaaaatgataaccatctcgcaaataaataagtattttactgttttcgtaacagttttgtaataaaaaaacctataaatattccggattattcataccgtcccaccatcgggcgcggatccgccaccatgaactccaaggacctgacccccttcctgaccaccctgtggctgctgctggaccactcccgtgtgcctcgtgtgcgtgctgaggaatgctgcgaagtgatcaacgtgaaccacccccccgagcgctgctacgacttcaagatgtgcaacctgttcaccgtggctctgcgttgccccgacggcgaagtgtgctactcccccgaaaagaccgctgagatccgtggtatcgtgaccaccatgacccactccctgacccgtcaagtgatccacaacaagctgaccagctgcaactacaaccccctgtacctcgaggctgacggtcgtatccgttgcggcaaggtgtccgacaaggctcagtacctgctgggtgctgctggttccgtgccctaccgttggatcaacctcgagtacgacaagatcacccgtatcgtgggcctggaccagtacctcgagtccgtgaagaagcacaagcgtctggacgtgtgccgtgctaagatgggttacatgctgcagtaaaagcttgtcgagaagtactagaggatcataatcagccataccacatttgtagaggttttacttgctttaaaaaacctcccacacctccccctgaacctgaaacataaaatgaatgcaattgttgttgttaacttgtttattgcagcttataatggttacaaataaagcaatagcatcacaaatttcacaaataaagcatttttttcactgcattctagttgtggtttgtccaaactcatcaatgtatcttatcatgtctggatctgatcactgcttgagcctagaagatccggctgctaacaaagcccgaaaggaagctgagttggctgctgtggctagctttgtttaactttaagaaggagatacatctagaccggaatattaatagatcatggagataattaaaatgataaccatctcgcaaataaataagtattttactgttttcgtaacagttttgtaataaaaaaacctataaatattccggattattcataccgtcccaccatcgggcgcggatccgccaccatgctgcgtctgctgctgcgtcaccacttccactgcctgctgctgtgcgctgtgtgggctaccccctgcctggcttccccttggtccaccctgaccgctaaccagaacccctccccaccctggtccaagctgacctactccaagccccacgacgctgctaccttctactgccccttcctgtacccatccccccctcgttccccactgcagttctccggtttccagcgtgtgctgaccggtcccgagtgccgtaacgagactctgtacctgctgtacaaccgcgagggccagaccctggtcgagaggtcctccacctgggtcaagaaggtcatctggtacttgtccggtcgtaaccagaccatcctgcagcgtatgccccgtaccgcttccaagccctccgacggcaacgtgcagatctccgtcgaggacgctaagatcttcggtgctcacatggtgcccaagcagaccaagctgctgcgtttcgtggtcaacgacggcacccgttaccagatgtgcgtgatgaagctcgagtcctgggctcacgtgttccgtgactactccgtgtccttccaagtgcgcctgaccttcaccgaggctaacaaccagacctacaccttctgcacccaccccaacctgatcgtgtaaaagcttgtcgagaagtactagaggatcataatcagccataccacatttgtagaggttttacttgctttaaaaaacctcccacacctccccctgaacctgaaacataaaatgaatgcaattgttgttgttaacttgtttattgcagcttataatggttacaaataaagcaatagcatcacaaatttcacaaataaagcatttttttcactgcattctagttgtggtttgtccaaactcatcaatgtatcttatcatgtctggatctgatcactgcttgagcctagaagatccggctgctaacaaagcccgaaaggaagctgagttggctgctgggtgcctaatgagtgagctaactcacattaattgcccggaatattaatagatcatggagataattaaaatgataaccatctcgcaaataaataagtattttactgttttcgtaacagttttgtaataaaaaaacctataaatattccggattattcataccgtcccaccatcgggcgcggatccgccaccatgcgtctgtgccgtgtgtggctgtccgtgtgcctgtgcgctgtggtgctgggccagtgccagcgtgaaaccgctgagaagaacgactactaccgtgtgccccactactgggacgcttgctcccgtgctctgcccgaccagacccgttacaagtacgtcgagcagctggtggacctgaccctgaactaccactacgacgcttcccacggcctggacaacttcgacgtgctgaagcgtatcaacgtgaccgaggtgtccctgctgatctccgacttccgtcgtcagaaccgtcgtggtggcaccaacaagcgtaccaccttcaacgctgctggttccctggctccccacgctcgttccctcgagttctccgtgcgtctgttcgctaactaaaagcttgtcgagaagtactagaggatcataatcagccataccacatttgtagaggttttacttgctttaaaaaacctcccacacctccccctgaacctgaaacataaaatgaatgcaattgttgttgttaacttgtttattgcagcttataatggttacaaataaagcaatagcatcacaaatttcacaaataaagcatttttttcactgcattctagttgtggtttgtccaaactcatcaatgtatcttatcatgtctggatctgatcactgcttgagcctagaagatccggctgctaacaaagcccgaaaggaagctgagttggctgctgccaccgctgagcaataactatcataacccccggaatattaatagatcatggagataattaaaatgataaccatctcgcaaataaataagtattttactgttttcgtaacagttttgtaataaaaaaacctataaatattccggattattcataccgtcccaccatcgggcgcggatcccggtccgaagcgcgcggaattcaaaggcctaccgtcgacgccaccatggaatcccgtatctggtgcctggtcgtgtgcgtgaacctgtgcatcgtgtgcctgggtgctgctgtgtcctcctcctccacccgtggcacctccgctacccactcccaccactcctcccacaccacctccgccgctcactcccgttccggttccgtgtcccagcgtgtgacctcctcccagaccgtgtcccacggtgtcaacgagactatctacaacaccaccctgaagtacggcgacgtcgtgggtgtcaacaccaccaagtacccctaccgtgtgtgctccatggctcagggcaccgacctgatccgtttcgagcgtaacatcgtgtgcacctccatgaagcccatcaacgaggacctggacgagggtatcatggtggtgtacaagcgcaacatcgtggctcacaccttcaaggtccgcgtgtaccagaaggtgctgaccttccgtcgttcctacgcttacatccacaccacttacctgctgggttccaacaccgagtacgtggcccctcccatgtgggagatccaccacatcaactcccactcccagtgctactcctcttactcccgtgtgatcgctggcaccgtgttcgtggcttaccaccgtgactcctacgagaacaagaccatgcagctgatgcccgacgactactccaacacccactccacccgttacgtgaccgtgaaggaccagtggcactcccgtggttccacctggctgtaccgtgaaacctgcaacctgaactgcatggtcaccatcaccaccgctcgttccaagtacccttaccacttcttcgctacctccaccggcgacgtggtggacatctcccccttctacaacggtactaaccgtaacgcttcctacttcggcgagaacgctgacaagttcttcatcttccccaactacaccatcgtgtccgacttcggtcgtcccaactccgctctggaaacccaccgtctggtggctttcttggagcgtgctgactccgtgatctcctgggacatccaggacgagaagaacgtgacctgccagctgaccttctgggaggcttccgagcgtaccatccgttccgaggctgaggactcctaccacttctccagcgctaagatgaccgctaccttcctgtccaagaaacaagaggtcaacatgtccgactccgccctggactgcgtgcgtgacgaggctatcaacaagctgcagcagatcttcaacacctcctacaaccagacctacgagaagtacggaaacgtgtccgtgttcgagactaccggtggcctggtggtgttctggcagggtatcaagcagaagtccctggtcgagctggaacgtctggctaaccgttcctccctgaacctgacccacaaccgtaccaagcgttccaccgacggcaacaacgctactcacctgtccaacatggaatccgtgcacaacctggtgtacgctcagctgcagttcacctacgacaccctgcgcggttacatcaaccgtgctctggctcagatcgctgaggcttggtgcgtggaccagcgtcgtaccctggaagtgttcaaggaactgtccaagatcaacccctccgctatcctgtccgccatctacaacaagcctatcgctgctcgtttcatgggcgacgtgctgggcctggcttcctgcgtgaccatcaaccagacttccgtgaaggtgctgcgtgacatgaacgtgaaggaatcccccggtcgttgctactcccgtcccgtggtcatcttcaacttcgctaactcctcctacgtgcagtacggccagctgggcgaggacaacgagatcctgctgggcaaccaccgtaccgaggaatgccagctgccctccctgaagatcttcatcgctggcaactccgcttacgaatacgtggactacctgttcaagcgcatgatcgacctgtcctccatctctaccgtggactccatgatcgctctggacatcgaccccctggaaaacaccgacttccgtgtgctggaactgtactcccagaaggaactgcgttccatcaacgtgttcgacctggaagagatcatgcgcgagttcaactcctacaagcagcgtgttaagtacgtcgaggacaaggtggtggaccccctgcccccctacctgaagggactggacgacctgatgtccggcctgggagctgccggcaaggctgtgggtgtcgctatcggtgctgtgggtggtgctgtggcttccgtggtcgagggtgtcgccaccttcctgaagaaccccttcggtgctttcaccatcatcctggtggctatcgctgtggtcatcatcatctacctgatctacacccgtcagcgtcgtctgtgcatgcagcccctgcagaacctgttcccctacctggtgtccgctgacggtactaccgtgacctccggcaacaccaaggacacctccctgcaggctcccccatcctacgaggaatccgtctacaactccggtcgcaagggtcccggtcccccttcctccgacgcttctaccgctgctcccccatacaccaacgagcaggcttaccagatgctgctggctctcgtgcgtctggacgctgagcagcgtgcacagcagaacggcaccgactccctggacggccagaccggaacccaggacaagggccagaagcccaacctgctggaccgtctgcgtcaccgcaagaacggttaccgtcacctgaaggactccgacgaggaagagaacgtctaaggcgcgccaagcttgtcgagaagtactagagatcataatcagccataccacatttgtagaggttttacttgctttaaaaaacctcccacacctccccctgaacctgaaacataaaatgaatgcaattgttgttgttaacttgtttattgcagcttataatggttacaaataaagcaatagcatcacaaatttcacaaataaagcatttttttcactgcattctagttgtggtttgtccaaactcatcaatgtatcttatcatgtctggatctgatcactgcttgagcctagaagatccggctgctaacaaagcccgaaaggaagctgggaatattaatagatcatggagataattaaaatgataaccatctcgcaaataaataagtattttactgttttcgtaacagttttgtaataaaaaaacctataaatattccggattattcataccgtcccaccatcgggcgcggatccgccaccatgcgtcccggcctgccctcctacctgatcgtgctggctgtgtgcctgctgtcccacctcctgtcctcccgttacggtgctgaggctatctccgagcccctggacaaggctttccacctcctgctgaacacctacggtcgtcctatccgtttcctgcgcgagaacaccacccagtgcacctacaactcctccctgcgcaactccaccgtcgtccgcgagaacgctatctccttcaacttcttccagtcctacaaccagtactacgtgttccacatgccccgttgcctgttcgctggtcccctggctgagcagttcctgaaccaggtggacctgaccgagactctcgagcgttaccagcagcgtctgaacacttacgctctggtgtccaaggacctggcttcctaccgttccttcagccagcagctgaaggctcaggactccctgggcgagcagcccaccactgtgcctccccctatcgacctgtccatcccccacgtgtggatgcccccccagaccactcctcacggctggaccgagtcccacaccacctccggactgcaccgtccccacttcaaccagacctgcatcctgttcgacggtcacgacctgctgttctccaccgtgaccccctgcctgcaccagggcttctacctcatcgacgagctgcgttacgtgaagatcaccctgaccgaggatttcttcgtggtcaccgtgtccatcgacgacgacacccccatgctgctgatcttcggtcacctcccccgtgtgctgttcaaggctccctaccagcgtgacaacttcatcctgcgtcagaccgagaagcacgagctgctggtgctggtcaagaaggaccagctgaaccgtcactcttacctgaaggaccccgacttcctggacgctgctctggacttcaactacctggacctgtccgctctgctgaggaactccttccaccgttacgctgtggacgtgctgaagtccggtcgttgccagatgctggaccgtcgtaccgtcgagatggctttcgcttacgccctggctctgttcgctgctgctcgtcaagaagaggctggcgctcaggtgtccgtgccccgtgctctggaccgtcaggctgctctgctgcagatccaagagttcatgatcacttgcctgtcccagaccccccctcgtaccaccctgctgctgtaccccaccgctgtggacctggctaagcgtgctctgtggacccccaaccagatcaccgacatcacctccctcgtgcgtctggtgtacatcctgtccaagcagaaccagcagcacctgatcccccagtgggctctgcgtcagatcgctgacttcgctctgaagctgcacaagacccacctggcttcattcctcagcgctttcgctcgccaagagctgtacctgatgggttccctggtgcactccatgctggtgcacaccaccgagcgtcgcgagatcttcatcgtggaaaccggcctgtgctccctggccgagctgtcccacttcacccagctgctggctcacccccaccacgagtacctgtccgacctgtacaccccctgctcctcttccggtcgtcgtgaccactccctggaacgtctgacccgtctgttccccgacgctaccgtgcctaccaccgtgcctgctgctctgtccatcctgtctaccatgcagccctccaccctggaaaccttccccgacctgttctgcctgcctctgggcgagtccttctccgctctgaccgtgtccgagcacgtgtcctacgtggtcaccaaccagtacctgatcaagggcatctcctaccccgtgtccaccaccgtcgtgggccagtccctgatcatcacccagaccgactcccagaccaagtgcgagctgacccgtaacatgcacaccactcactccatcaccgctgctctgaacatctccctcgagaactgcgctttctgccagtccgctctgttggagtacgacgacactcagggtgtcatcaacatcatgtacatgcacgactccgacgacgtgctgttcgctctggacccctacaacgaggtggtggtgtcctccccccgtacccactacctgatgctgctgaagaacggcaccgtgctggaagtgaccgacgtggtggtggacgctaccgaccgtctgctgatgatgtccgtgtacgctctgtccgctatcatcggcatctacctgctgtaccgtatgctgaagacctgctaaggcgccaagctttgtcgagaagtactagaggatcataatcagccataccacatttgtagaggttttacttgctttaaaaaacctcccacacctccccctgaacctgaaacataaaatgaatgcaattgttgttgttaacttgtttattgcagcttataatggttacaaataaagcaatagcatcacaaatttcacaaataaagcatttttttcactgcattctagttgtggtttgtccaaactcatcaatgtatcttatcatgtctggatctgatcactgcttgagcctagaagatccggctgctaacaaagcccgaaaggaagctgagttggctgctgccaccgctgagcaataactatcataacccctaggagatccgaaccagataagtgaaatctagttccaaactattttgtcatttttaattttcgtattagcttacgacgctacacccagttcccatctattttgtcactcttccctaaataatccttaaaaactccatttccacccctcccagttcccaactattttgtccgcccaca

SEQ ID NO: 44 - DNA, 26012 bp, Artificial Sequence
  Synthetic construct
ttgttccagtttggaacaagagtccactattaaagaacgtggactccaacgtcaaagggcgaaaaaccgtctatcagggcgatggcccactacgtgaaccatcaccctaatcaagttttttggggtcgaggtgccgtaaagcactaaatcggaaccctaaagggagcccccgatttagagcttgacggggaaagccggcgaacgtggcgagaaaggaagggaagaaagcgaaaggagcgggcgctagggcgctggcaagtgtagcggtcacgctgcgcgtaaccaccacacccgccgcgcttaatgcgccgctacagggcgcgtccattcgccattcaggctgcgcaactgttgggaagggcgatcggtgcgggcctcttcgctattacgccagctggcgaaagggggatgtgctgcaaggcgattaagttgggtaacgccagggttttcccagtcacgacgttgtaaaacgacggccagtgcatagaccagccgcgtaacctggcaaaatcggttacggttgagtaataaatggatgccctgcgtaagcgggtgtgggcggacaataaagtcttaaactgaacaaaatagatctaaactatgacaataaagtcttaaactagacagaatagttgtaaactgaaatcagtccagttatgctgtgaaaaagcatactggacttttgttatggctaaagcaaactcttcattttctgaagtgcaaattgcccgtcgtattaaagaggggcgtggccaagggcatggtaaagactatattcgcggcgttgtgacaatttaccgaacaactccgcggccgggaagccgatctcggcttgaacgaattgttaggtggcggtacttgggtcgatatcaaagtgcatcacttcttcccgtatgcccaactttgtatagagagccactgcgggatcgtcaccgtaatctgcttgcacgtagatcacataagcaccaagcgcgttggcctcatgcttgaggagattgatgagcgcggtggcaatgccctgcctccggtgctcgccggagactgcgagatcatagatatagatctcactacgcggctgctcaaacttgggcagaacgtaagccgcgagagcgccaacaaccgcttcttggtcgaaggcagcaagcgcgatgaatgtcttactacggagcaagttcccgaggtaatcggagtccggctgatgttgggagtaggtggctacgtctccgaactcacgaccgaaaagatcaagagcagcccgcatggatttgacttggtcagggccgagcctacatgtgcgaatgatgcccatacttgagccacctaactttgttttagggcgactgccctgctgcgtaacatcgttgctgctgcgtaacatcgttgctgctccataacatcaaacatcgacccacggcgtaacgcgcttgctgcttggatgcccgaggcatagactgtacaaaaaaacagtcataacaagccatgaaaaccgccactgcgccgttaccaccgctgcgttcggtcaaggttctggaccagttgcgtgagcgcatacgctacttgcattacagtttacgaaccgaacaggcttatgtcaactgggtttgtgccttcatccgtttccacggtgtgcgtcacccggcaaccttgggcagcagcgaagtcgaggcatttctgtcctggctggcgaacgagcgcaaggtttcggtctccacgcatcgtcaggcattggcggccttgctgttcttctacggcaaggtgctgtgcacggatctgcccttgcttcaggagatcggtagacctcggccgtcgcggcgcttgccggtggtgctgaccccggatgaagtggttcgcatcctcggttttctggaaggcgagcatcgtttgttcgcccaggactctagctatagttctagtggttggctacagctttgtttgtactatcaacaggttgaactgctgatcaacagatcctctacgcggccgcggtaccataacttcgtatagcatacattatacgaagttatctggtttaaacgtacccgtagtggctatggcagggcttgccgccccgacgttggctgcgagccctgggccttcacccgaacttgggggttggggtggggaaaaggaagaaacgcgggcgtattggtcccaatggggtctcggtggggtatcgacagagtgccagccctgggaccgaaccccgcgtttatgaacaaacgacccaacacccgtgcgttttattctgtctttttattgccgtcatagcgcgggttccttccggtattgtctccttccgtgtttcagttagcctcccccatctcccggtaccgcatgctatgcatcagctgctagcaccatggctcgagatcccgggtgatcaagtcttcgtcgagtgattgtaaataaaatgtaatttacagtatagtattttaattaatatacaaatgatttgataataattcttatttaactataatatattgtgttgggttgaattaaaggtccgtatactagtatcgattcgcgacctactccggaatattaatagatcatggagataattaaaatgataaccatctcgcaaataaataagtattttactgttttcgtaacagttttgtaataaaaaaacctataaatattccggattattcataccgtcccaccatcgggcgcggatccgccaccatggaaaactggtccgctctggaactgctgcccaaggtcggaatccctaccgacttcctgacccacgtcaagacctccgctggcgaggaaatgttcgaggctctgaggatctactacggcgacgaccccgagcgttacaacatccacttcgaggctatcttcggcaccttctgcaaccgtctggaatgggtgtacttcctgacttccggcctggctgctgctgctcacgctatcaagttccacgacctgaacaagctgaccaccggcaagatgctgttccacgtgcaagtgccccgtgtggcttccggtgctggcctgcctacctcccgtcagaccaccatcatggtcaccaagtactccgagaagtcccccatcaccatccctttcgagctgtccgctgcttgcctgacttacctgcgtgaaaccttcgagggcaccatcctggacaagatcctgaacgtcgaggctatgcacaccgtgctgcgtgctctgaagaacaccgctgacgctatggaacgtggcctgatccacagcttcctccagaccctgctgaggaaggctcccccctacttcgtggtgcagaccctggtcgagaacgctaccctggctcgtcaggctctgaaccgtatccagcgctccaacatcctgcagtccttcaaggctaagatgctggctaccctgttcctgctgaaccgtacccgtgaccgtgactacgtgctgaagttcctgacccgtctggctgaggctgctaccgactccatcctcgacaaccctactacctacaccacctcctccggtgctaagatctccggtgtcatggtgtccaccgctaacgtgatgcagatcatcatgtccctgctgtcctcccacatcactaaggaaaccgtgtccgctcccgctacctacggcaacttcgtgctgtcccccgagaacgctgtgaccgctatctcctaccactctatcctggctgacttcaactcctacaaggctcacctgacctccggccagccccacctccccaacgactccctgagccaggctggtgctcactccctgacccccctgtccatggacgtgatccgtctgggcgaaaagaccgtgatcatggaaaacctgcgtcgcgtgtacaagaacaccgacaccaaggaccccctggaacgtaacgtggacctgaccttcttcttccccgtgggcctgtacctgcccgaggaccgtggttacaccaccgtcgagtccaaggtcaagctgaacgacaccgtgcgtaacgctctgcccaccaccgcttacctgctgaacagggaccgtgctgtgcaaaagatcgacttcgtggacgctctcaagaccctgtgccaccccgtgctgcacgagcctgctccatgcctgcaggctttcaccgagcgtggtcccccatccgagcccgctatgcagcgtctgctggaatgccgtttccagcaagagcccatgggtggtgctgctcgtcgtatcccccacttctaccgtgtgcgccgcgaggtgccccgtaccgtgaacgagatgaagcaggacttcgtggtcaccgacttctacaaggttggaaacatcaccctgtacaccgagctgcaccctttcttcgacttcacccactgccaagagaactccgagactgtggctctgtgcaccccccgtatcgtgatcggcaacctgcccgacggcctggctcccggtcccttccacgagctgaggacctgggagatcatggaacacatgcgcctgcgtcccccacccgactacgaggaaaccctgcgtctgttcaagaccaccgtgacctcccccaactaccccgagctgtgctacctggtggacgtgctggtgcacggcaacgctgacgctttcctgctgatccgcgctttcatcgctcgttgcatcgtgaacatgttccacacccgtcagctgctggtgttcgctcactcctacgctctggtcaccctgatcgctgagcacctggctgacggtgctctgcccccccagctcctgttccactaccgtaacctggtggctgtgctgcgcctggtcacccgtatctccgctctgcccggcctgaacaacggccagctggctgaggaacccctgtccgcttacgtgaacgctctgcacgaccacaggctgtggccccccttcgtgacccacctccctcgtaacatggaaggtgtccaggtggtggctgatcgtcagcccctgaaccccgctaacatcgaggctcgtcaccacggtgtctccgacgtgccccgtctgggtgctatggacgctgacgagcccctgttcgtggacgactaccgtgctaccgacgacgagtggaccctgcaaaaggtgttctacctgtgcctgatccccgctatgaccaacaaccgtgcttgcggcctgggcctgaacctcaagactctgctggtggacctgttctaccgtcccgccttcctgctcatgcccgctgctaccgctgtgtccacctccggcaccacctccaaggaatccacctctggtgtcacccccgaggactccgtggctgctcagcgtcaggctgtgggcgagatgctgaccgagctggtcgaggacgtggccaccgacgctcacacccctctgctgcaggcttgccgcgagctgttcctggctgtgcagttcgtgggcgagcacgtgaaggtgctggaagtgcgtgctcccctggaccacgctcagaggcagggactgcccgacttcatctcccgtcagcatgtgctgtacaacggttgctgcgtcgtgaccgctcctaagaccctgatcgagtactccctgcccgtgcccttccaccgtttctactccaaccccaccatctgcgctgctctgtccgacgacatcaagcgttacgtgaccgagttcccccactaccatagacacgatggtggtttccccctgcccaccgctttcgctcacgagtaccacaactggctgcgtagccccttctcccgttactccgctacctgccccaacgtgctgcactccgtgatgaccctggctgctatgctgtacaagatctcccccgtgtccctggtgctgcagaccaaggctcacatccaccccggtttcgctctgaccgctgtgcgtaccgacaccttcgaggtggacatgctgctgtactccggcaagtcctgcacctccgtcatcatcaacaaccccatcgtgaccaaggaagagagggacatctccaccacctaccacgtgacccagaacatcaacaccgtggacatgggcctgggttacacctccaacacttgcgtggcctacgtgaaccgcgtccgcaccgacatgggtgtccgtgtgcaggacctgttccgtgtgttccccatgaacgtgtaccgccacgatgaggtggaccgttggatcaggcacgctgctggcgtcgagcgtccccagctgctggacaccgagactatctccatgctgaccttcggttccatgtccgagcgcaacgctgctgctaccgtgcacggccagaaggctgtctgcgagctgatcctgacccctgtgactatggacgtgaactacttcaagatcaccaacaaccctcgtggtcgtgcttcctgcatgctgggcgtggacccctacgacaccgaggctgccaccaaggctatctacgaccaccgcgaggctgacgctcagaccttcgctgctacccacaacccatgggcttcccaggctggttgcctgtccgacgtcctgtacaacacccgtcaccgcgagcgtctgggctacaactccaagttctactccccctgcgctcagtacttcaacaccgaggaaatcatcgctgccaacaagaccctcttcaagaccatcgacgagtacctgctgcgcgctaaggactgcatccgtggcgacaccgacactcagtacgtgtgcgtcgagggaaccgagcagctgatcgagaacccttgccgtctgacccaagaggctctgcccatcctgtccaccaccaccctggctctgatggaaactaagctgaagggtggcgctggtgctttcgctacctccgagactcacttcggcaactacgtcgtgggagagatcatccccctgcagcagtccatgctgttcaacagctaagagctcaagcttgtcgagaagtactagaggatcataatcagccataccacatttgtagaggttttacttgctttaaaaaacctcccacacctccccctgaacctgaaacataaaatgaatgcaattgttgttgttaacttgtttattgcagcttataatggttacaaataaagcaatagcatcacaaatttcacaaataaagcatttttttcactgcattctagttgtggtttgtccaaactcatcaatgtatcttatcatgtctggatctgatcactgcttgagcctagaagatccggctgctaacaaagcccgaaaggaagctgagttggctgctgtggctagctttgtttaactttaagaaggagatacatctagaccggaatattaatagatcatggagataattaaaatgataaccatctcgcaaataaataagtattttactgttttcgtaacagttttgtaataaaaaaacctataaatattccggattattcataccgtcccaccatcgggcgcggatcccggtccgaagcgcgcggaattcaaaggcctacgtcgacgccaccatggaatcccgtggtcgtcgttgccccgagatgatctccgtgctgggtcccatctccggtcacgtcctgaaggctgtgttctcccgtggcgacacccccgtgctgccccacgaaactcgtctgctgcagaccggtatccacgtgcgtgtgtcccagccctccctgatcctggtgtcccagtacacccccgactccaccccttgccaccgcggagacaaccagctgcaggtccagcacacctacttcaccggttccgaggtcgagaacgtgtccgtgaacgtgcacaaccccaccggtcgttccatctgcccctcccaagagcccatgtccatctacgtgtacgctctgcccctgaagatgctgaacatcccctccatcaacgtgcaccactacccctccgctgctgagcgcaagcaccgtcacctccccgtggctgacgctgtgatccacgcttccggcaagcagatgtggcaggctcgtctgaccgtgtccggcctggcttggacccgtcagcagaaccagtggaaggaacccgacgtgtactacacctccgctttcgtgttccccaccaaggacgtggccctgcgtcacgtcgtgtgcgctcacgaactcgtgtgctccatggaaaacacccgtgctaccaagatgcaagtgatcggcgaccagtacgtgaaggtgtacctggaatccttctgcgaggacgtgccctccggcaagctgttcatgcacgtgaccctgggttccgacgtggaagaggacctgaccatgacccgtaacccccagcccttcatgcgtccccacgagcgtaacggtttcaccgtgctgtgccccaagaacatgatcatcaagcccggcaagatctcccacatcatgctggacgtggccttcacctcccacgagcacttcggcctgctgtgccctaagtccatccccggcctgtccatctccggcaacctgctgatgaacggccagcagatcttcctggaagtgcaggctatccgtgaaaccgtcgagctgcgtcagtacgaccctgtggctgctctgttcttcttcgacatcgacctgctgctgcagcgtggtccccagtactccgagcaccccaccttcaccagccagtaccgtatccagggcaagctggaataccgtcacacctgggaccgtcacgacgagggtgctgctcagggcgacgacgacgtgtggacctccggttccgactccgacgaggaactggtcaccaccgagcgcaagaccccccgtgtgaccggtggtggtgctatggctggtgcttccacctccgctggtcgcaagcgcaagtccgcttcctccgctaccgcttgcaccgctggtgtcatgacccgtggtcgcctgaaggctgagtccaccgtggctcccgaagaggacactgacgaggactccgacaacgagatccacaaccccgctgtgttcacctggcccccctggcaggctggtatcctggctcgtaacctggtgcccatggtggctaccgtgcagggccagaacctgaagtaccaagagttcttctgggacgccaacgacatctaccgtatcttcgctgagctggaaggcgtgtggcagcccgctgctcagcccaagcgtcgtcgtcaccgtcaggacgctctgcctggtccctgtatcgcttccacccccaagaagcaccgcggctaaaagcttgtcgagaagtactagaggatcataatcagccataccacatttgtagaggttttacttgctttaaaaaacctcccacacctccccctgaacctgaaacataaaatgaatgcaattgttgttgttaacttgtttattgcagcttataatggttacaaataaagcaatagcatcacaaatttcacaaataaagcatttttttcactgcattctagttgtggtttgtccaaactcatcaatgtatcttatcatgtctggatctgatcactgcttgagcctagaagatccggctgctaacaaagcccgaaaggaagctgagttggctgctgccaccgctgagcaataactatcataaccggaatattaatagatcatggagataattaaaatgataaccatctcgcaaataaataagtattttactgttttcgtaacagttttgtaataaaaaaacctataaatattccggattattcataccgtcccaccatcgggcgcggatcccggtccgaagcgcgcggaattcgccaccatgaccatggacgagcagcagccccaggctgtgacccccgtgtacgtgggcggtttcctggctcgttacgaccagtcccccgacgaggctgagctgctgctgccacgtgacgtggtcgaacactggctgcacgctcagggccagggacagccttccctgtccgtggctctgcccctgaacatcaaccacgacgacaccgctgtcgtgggtcacgtggccgctatgcagtccgtgcgtgacggcctgttctgcctgggttgcgtgacctccccccgtttcctggaaatcgtgcgtcgtgcttccgagaagtccgagctggtgtcccgtggtcccgtgtccccactgcagcccgacaaggtggtcgagttcctgtccggttcctacgctggcctgtccctgtcatcccgtcgttgcgacgacgtcgaggctgctacctccctgagcggctccgagactacccccttcaagcacgtggccctgtgctccgtgggtcgtaggcgtggaaccctggctgtgtacggtcgtgaccccgagtgggtcacccagcgtttccccgacctgaccgctgctgaccgtgacggactgcgtgctcagtggcagcgttgcggttccaccgctgtggacgcttccggcgaccccttccgttccgactcctacggcctgctgggcaactccgtggacgctctgtacatccgcgagcgtctgcccaagctgcgttacgacaagcagctcgtgggtgtcaccgagcgcgagtcctacgtgaaggcttccgtgtcccccgaggctgcttgcgacatcaaggctgcttccgctgagcgttctggcgacagccgctcccaggctgctactcctgctgctggtgctcgtgtgccctccagctccccatccccacctgtcgagcctccctcccccgtgcaacctcctgctctgcctgcttccccctccgtgctgcctgctgagtccagcccctccctgtcaccctctgagcctgctgaggctgcctccatgtcccaccctctgagcgctgctgtgactgctgctaccgctccccctggtgctactgtggctggtgcttcccccgctgtgccttccctggcttggcctcacgacggtgtctacctgcccaaggacgctttcttctccctgctgggcgcttcccgttccgctgctcccgtgatgtaccccggtgctgtggctgctccccccagcgcttcacctgctcctctgcccctgccctcctaccccgcttcctacggtgctcccgtcgtgggttacgaccagctggctgctcgtcacttcgctgactacgtggacccccactaccccggctggggtcgtcgttacgagcccgctccttccctgcacccatcctaccctgtgccccctcctccatcacccgcttactaccgtcgtcgtgactcccccggtggcatggacgagcctccatctggatgggagcgttacgacggttcccaccgtggccagtcccaaaagcagcaccgtcacggtggttccggtggtcacaacaagcgtcgcaaggaagccgctgctgcatcctccagctccgacgaggacctgagcttccccggcgaggctgaacacggtcgtgctcgcaagcgtctgaagtcccacgtgaactccgacggaggtagcggaggccacgctggttccaaccagcagcagcaacagcgctacgacgagctgcgtgacgctatccacgagctgaagcgtgacctgttcgctgctcgccagtcctccaccctgctgtctgctgctctgccagctgccgcttcttcctcccctaccaccaccaccgtgtgcacccctactggcgagctgacctctggtggtggcgagactcccaccgctctgctgtccggtggtgctaaggtggccgagcgtgctcaggctggtgtcgtgaacgcttcctgccgtctggctaccgcttccggttccgaggctgccaccgctggtccctctaccgctggttcctcatcctgcccagcttccgtggtgctggctgccgctgctgctcaagccgccgctgcttcacagtcccccccaaaggatatggtggacctgaaccgtcgtatcttcgtggctgctctgaacaagctcgagtaataaaagcttgtcgagaagtactagaggatcataatcagccataccacatttgtagaggttttacttgctttaaaaaacctcccacacctccccctgaacctgaaacataaaatgaatgcaattgttgttgttaacttgtttattgcagcttataatggttacaaataaagcaatagcatcacaaatttcacaaataaagcatttttttcactgcattctagttgtggtttgtccaaactcatcaatgtatcttatcatgtctggatctgatcactgcttgagcctagaagatccggctgctaacaaagcccgaaaggaagctgggaatattaatagatcatggagataattaaaatgataaccatctcgcaaataaataagtattttactgttttcgtaacagttttgtaataaaaaaacctataaatattccggattattcataccgtcccaccatcgggcgcggatccgccaccatggctgctatggaagctaacatcttctgcaccttcgaccacaagctgtctatcgctgacgtgggcaagctgaccaagctggtggctgctgtggtgcccatcccccagcgtctgcacctgatcaagcactaccagctgggcctgcaccagttcgtggaccacacccgtggttacgtgcgtctgcgtggcctgctgcgtaacatgaccctgaccctgatgcgtcgtgtcgagggcaaccagatcctgctgcacgtgcccacccacggcctgctgtacaccgtgctgaacaccggtcccgtgacctgggagaagggcgacgctctgtgcgtgctgccccccctgttccacggtcccctggctcgtgaaaacctgttgaccctgggccagtgggagctggtgctgccctggatcgtgcccatgcccctggctctggaaatcaaccagcgcctgctgatcatgggcctgttctccctggaccgttcctacgaagaagtgaaggctgctgtccagcagctgcagaccatcaccttccgtgacgctaccttcaccatccccgaccccgtgatcgaccagcacctcctgatcgacatgaagaccgcttgcctgtccatgtccatggtggctaacctggcttccgagctgaccatgacctacgtccgcaagctggctttggaggactcttccatgctgctggtcaagtgccaagagctgctgatgcgtctggaccgcgagcgttccgtgggcgagcctcgtactcccgctcgtcctcagcacgtgtcccccgacgacgagatcgctcgtctgtccgctctgttcgtgatgctgcgtcagctggacgacctgatccgcgagcaggtcgtgttcaccgtgtgcgacgtgagcccagacaacaagtccgctacctgcatcttcaagggctaaggcgcgccaagcttgtcgagaagtactagaggatcataatcagccataccacatttgtagaggttttacttgctttaaaaaacctcccacacctccccctgaacctgaaacataaaatgaatgcaattgttgttgttaacttgtttattgcagcttataatggttacaaataaagcaatagcatcacaaatttcacaaataaagcatttttttcactgcattctagttgtggtttgtccaaactcatcaatgtatcttatcatgtctggatctgatcactgcttgagcctagaagatccggctgctaacaaagcccgaaaggaagctgagttggctgctgccaccgctgagcaataactatcataacccctaggggcctctaaacgggtcttgaggggttttttgctgaaaggaggaactatatccggatctgaacaggagggacagctgatagaaacagaagccactggagcacctcaaaaacaccatcatacactaaatcagtaagttggcagcatcacccgacgcactttgcgccgaataaatacctgtgacggaagatcacttcgcagaataaataaatcctggtgtccctgttgataccgggaagccctgggccaacttttggcgaaaatgagacgttgatcggcacgtaagaggttccaactttcaccataatgaaataagatcactaccgggcgtattttttgagttatcgagattttcaggagctaaggaagctaaaatggagaaaaaaatcactggatataccaccgttgatatatcccaatggcatcgtaaagaacattttgaggcatttcagtcagttgctcaatgtacctataaccagaccgttcagctggatattacggcctttttaaagaccgtaaagaaaaataagcacaagttttatccggcctttattcacattcttgcccgcctgatgaatgctcatccggaattccgtatggcaatgaaagacggtgagctggtgatatgggatagtgttcacccttgttacaccgttttccatgagcaaactgaaacgttttcatcgctctggagtgaataccacgacgatttccggcagtttctacacatatattcgcaagatgtggcgtgttacggtgaaaacctggcctatttccctaaagggtttattgagaatatgtttttcgtctcagccaatccctgggtgagtttcaccagttttgatttaaacgtggccaatatggacaacttcttcgcccccgttttcaccatgggcaaatattatacgcaaggcgacaaggtgctgatgccgctggcgattcaggttcatcatgccgtttgtgatggcttccatgtcggcagaatgcttaatgaattacaacagtactgcgatgagtggcagggcggggcgtaatttttttaaggcagttattggtgcccttaaacgcctggttgctacgcctgaataagtgataataagcggatgaatggcagaaattcgaaagcaaattcgacccggtcgtcggttcagggcagggtcgttaaatagccgcttatgtctattgctggtttaccggtttattgactaccggaagcagtgtgaccgtgtgcttctcaaatgcctgaggccagtttgctcaggctctccccgtggaggtaataattgacgatatgatcatttattctgcctcccagctgacattcatccggggtcagcaccgtttctgcggactggctttctacgtgttccgcttcctttagcagcccttgcgccctgagtgcttgcggcagcgtgaagctaattctgtcagccgttaagtgttcctgtgtcactcaaaattgctttgagaggctctaagggcttctcagtgcgttacatccctggcttgttgtccacaaccgttaaaccttaaaagctttaaaagccttatatattcttttttttcttataaaacttaaaaccttagaggctatttaagttgctgatttatattaattttattgttcaaacatgagagcttagtacgtgaaacatgagagcttagtacgttagccatgagagcttagtacgttagccatgagggtttagttcgttaaacatgagagcttagtacgttaaacatgagagcttagtacgtgaaacatgagagcttagtacgtactatcaacaggttgaactgctgatcaacagatcctctacgcggccgcggtaccataacttcgtatagcatacattatacgaagttatctggtttaaacgtacccgtagtggctatggcagggcttgccgccccgacgttggctgcgagccctgggccttcacccgaacttgggggttggggtggggaaaaggaagaaacgcgggcgtattggtcccaatggggtctcggtggggtatcgacagagtgccagccctgggaccgaaccccgcgtttatgaacaaacgacccaacacccgtgcgttttattctgtctttttattgccgtcatagcgcgggttccttccggtattgtctccttccgtgtttcagttagcctcccccatctcccggtaccgcatgctatgcatcagctgctagcttagcgagcgtccacagcctggggaccgtaacgggagtgagcgggcaggttcacacgggtctgcttcagctcagggggcaggccagcgtagtacttgtccaggtgacgcagcaggggggggtccagctggtgacgcaggcagaattccttcacagcgttgtacaggccgtagaacagggtgataccctcgggagcagcagcggtggacacgggcagacgcacagcacggttggtacgggtagcctcgttacggatagccaccaccacgttgaacagggaggggggcaccagctcgaaacccagcacgtgttcggtgaagatggaacgaccgtaggacagacgagtcaggtcgtaaccacggcacaggtcgtccacgcaagtgtacacagcgggggaaccgtcgccgcactcggagtaaccgcgcatcacggtcatccaacggggagcggtgtcggaggacagcagggtcagcagagcacgcagctggtcggggttgttgtacagcagggccagggtgtccaggaaagcgtcgtccagcagcacggagttagcagcctcgggggtcacgggacggtaacggatcagctgggacaggggaccgtccctacgggtcacgttgaccaggggacgcagccaggactcgtacttgtcgccctggaacacctctcccagcaggcaacgacgggtcagctcggggcactcagcgggcaccttctcagccacggtgggagccacggacacggtagcggaggacacgatgggcagcagcaggcagcaccacagcagagccacgggaccgggggagaaggagaaaccgcagtcgggacgacggcacatggtggctcgagatcccgggtgatcaagtcttcgtcgagtgattgtaaataaaatgtaatttacagtatagtattttaattaatatacaaatgatttgataataattcttatttaactataatatattgtgttgggttgaattaaaggtccgtatactagtatcgattcgcgacctactccggaatattaatagatcatggagataattaaaatgataaccatctcgcaaataaataagtattttactgttttcgtaacagttttgtaataaaaaaacctataaatattccggattattcataccgtcccaccatcgggcgcggatccgccaccatgaactccaaggacctgacccccttcctgaccaccctgtggctgctgctggaccactcccgtgtgcctcgtgtgcgtgctgaggaatgctgcgaagtgatcaacgtgaaccacccccccgagcgctgctacgacttcaagatgtgcaacctgttcaccgtggctctgcgttgccccgacggcgaagtgtgctactcccccgaaaagaccgctgagatccgtggtatcgtgaccaccatgacccactccctgacccgtcaagtgatccacaacaagctgaccagctgcaactacaaccccctgtacctcgaggctgacggtcgtatccgttgcggcaaggtgtccgacaaggctcagtacctgctgggtgctgctggttccgtgccctaccgttggatcaacctcgagtacgacaagatcacccgtatcgtgggcctggaccagtacctcgagtccgtgaagaagcacaagcgtctggacgtgtgccgtgctaagatgggttacatgctgcagtaaaagcttgtcgagaagtactagaggatcataatcagccataccacatttgtagaggttttacttgctttaaaaaacctcccacacctccccctgaacctgaaacataaaatgaatgcaattgttgttgttaacttgtttattgcagcttataatggttacaaataaagcaatagcatcacaaatttcacaaataaagcatttttttcactgcattctagttgtggtttgtccaaactcatcaatgtatcttatcatgtctggatctgatcactgcttgagcctagaagatccggctgctaacaaagcccgaaaggaagctgagttggctgctgtggctagctttgtttaactttaagaaggagatacatctagaccggaatattaatagatcatggagataattaaaatgataaccatctcgcaaataaataagtattttactgttttcgtaacagttttgtaataaaaaaacctataaatattccggattattcataccgtcccaccatcgggcgcggatccgccaccatgctgcgtctgctgctgcgtcaccacttccactgcctgctgctgtgcgctgtgtgggctaccccctgcctggcttccccctggttcaccctgaccgctaaccagaacccctccccaccctggtccaagctgacctaccccaagccccacgacgctgctaccttctactgccccttcctgtacccatccccacctcgttccccatcccagttctccggtttccagcgtgtgtccaccggtcccgagtgccgtaacgagactctgtacctgctgtacaaccgcgagggccagaccctggtcgagaggtcctccacctgggtcaagaaggtcatctggtacttgtccggtcgtaaccagaccatcctgcagcgtatgccccgtaccgcttccaagccctccgacggcaacgtgcagatctccgtcgaggacgctaagatcttcggtgctcacatggtgcccaagcagaccaagctgctgcgtttcgtggtcaacgacggcacccgttaccagatgtgcgtgatgaagctggaatcctgggctcacgtgttccgtgactactccgtgtccttccaagtgcgcctgaccttcaccgaggctaacaaccagacctacaccttctgcacccaccccaacctgatcgtgtaagtcgacaagcttgtcgagaagtactagaggatcataatcagccataccacatttgtagaggttttacttgctttaaaaaacctcccacacctccccctgaacctgaaacataaaatgaatgcaattgttgttgttaacttgtttattgcagcttataatggttacaaataaagcaatagcatcacaaatttcacaaataaagcatttttttcactgcattctagttgtggtttgtccaaactcatcaatgtatcttatcatgtctggatctgatcactgcttgagcctagaagatccggctgctaacaaagcccgaaaggaagctgagttggctgctgggtgcctaatgagtgagctaactcacattaattgcccggaatattaatagatcatggagataattaaaatgataaccatctcgcaaataaataagtattttactgttttcgtaacagttttgtaataaaaaaacctataaatattccggattattcataccgtcccaccatcgggcgcggatccgccaccggatccgccaccatgcgtctgtgccgtgtgtggctgtccgtgtgcctgtgcgctgtggtgctgggacagtgccagcgtgaaaccgctgagaagaacgactactaccgtgtgccccactactgggacgcttgctcccgtgctctgcccgaccagacccgttacaagtacgtcgagcagctggtggacctgaccctgaactaccactacgacgcttcccacggcctggacaacttcgacgtgctgaagcgtatcaacgtgaccgaggtgtccctgctgatctccgacttccgtcgtcagaaccgtcgtggtggcaccaacaagcgtaccaccttcaacgctgctggttccctggctccccacgctcgttccttggagttctccgtgcgtctgttcgccaactaataaaagcttgtcgagaagtactagaggatcataatcagccataccacatttgtagaggttttacttgctttaaaaaacctcccacacctccccctgaacctgaaacataaaatgaatgcaattgttgttgttaacttgtttattgcagcttataatggttacaaataaagcaatagcatcacaaatttcacaaataaagcatttttttcactgcattctagttgtggtttgtccaaactcatcaatgtatcttatcatgtctggatctgatcactgcttgagcctagaagatccggctgctaacaaagcccgaaaggaagctgagttggctgctgccaccgctgagcaataactatcataacccccggaatattaatagatcatggagataattaaaatgataaccatctcgcaaataaataagtattttactgttttcgtaacagttttgtaataaaaaaacctataaatattccggattattcataccgtcccaccatcgggcgcggatcccggtccgaagcgcgcggaattcaaaggcctaccgtcgacgccaccatggaatcccgtatctggtgcctggtcgtgtgcgtgaacctgtgcatcgtgtgcctgggtgctgctgtgtcctcctcctccacccgtggcacctccgctacccactcccaccactcctcccacaccacctccgccgctcactcccgttccggttccgtgtcccagcgtgtgacctcctcccagaccgtgtcccacggtgtcaacgagactatctacaacaccaccctgaagtacggcgacgtcgtgggtgtcaacaccaccaagtacccctaccgtgtgtgctccatggctcagggcaccgacctgatccgtttcgagcgtaacatcgtgtgcacctccatgaagcccatcaacgaggacctggacgagggtatcatggtggtgtacaagcgcaacatcgtggctcacaccttcaaggtccgcgtgtaccagaaggtgctgaccttccgtcgttcctacgcttacatccacaccacttacctgctgggttccaacaccgagtacgtggcccctcccatgtgggagatccaccacatcaactcccactcccagtgctactcctcttactcccgtgtgatcgctggcaccgtgttcgtggcttaccaccgtgactcctacgagaacaagaccatgcagctgatgcccgacgactactccaacacccactccacccgttacgtgaccgtgaaggaccagtggcactcccgtggttccacctggctgtaccgtgaaacctgcaacctgaactgcatggtcaccatcaccaccgctcgttccaagtacccttaccacttcttcgctacctccaccggcgacgtggtggacatctcccccttctacaacggtactaaccgtaacgcttcctacttcggcgagaacgctgacaagttcttcatcttccccaactacaccatcgtgtccgacttcggtcgtcccaactccgctctggaaacccaccgtctggtggctttcttggagcgtgctgactccgtgatctcctgggacatccaggacgagaagaacgtgacctgccagctgaccttctgggaggcttccgagcgtaccatccgttccgaggctgaggactcctaccacttctccagcgctaagatgaccgctaccttcctgtccaagaaacaagaggtcaacatgtccgactccgccctggactgcgtgcgtgacgaggctatcaacaagctgcagcagatcttcaacacctcctacaaccagacctacgagaagtacggaaacgtgtccgtgttcgagactaccggtggcctggtggtgttctggcagggtatcaagcagaagtccctggtcgagctggaacgtctggctaaccgttcctccctgaacctgacccacaaccgtaccaagcgttccaccgacggcaacaacgctactcacctgtccaacatggaatccgtgcacaacctggtgtacgctcagctgcagttcacctacgacaccctgcgcggttacatcaaccgtgctctggctcagatcgctgaggcttggtgcgtggaccagcgtcgtaccctggaagtgttcaaggaactgtccaagatcaacccctccgctatcctgtccgccatctacaacaagcctatcgctgctcgtttcatgggcgacgtgctgggcctggcttcctgcgtgaccatcaaccagacttccgtgaaggtgctgcgtgacatgaacgtgaaggaatcccccggtcgttgctactcccgtcccgtggtcatcttcaacttcgctaactcctcctacgtgcagtacggccagctgggcgaggacaacgagatcctgctgggcaaccaccgtaccgaggaatgccagctgccctccctgaagatcttcatcgctggcaactccgcttacgaatacgtggactacctgttcaagcgcatgatcgacctgtcctccatctctaccgtggactccatgatcgctctggacatcgaccccctggaaaacaccgacttccgtgtgctggaactgtactcccagaaggaactgcgttccatcaacgtgttcgacctggaagagatcatgcgcgagttcaactcctacaagcagcgtgttaagtacgtcgaggacaaggtggtggaccccctgcccccctacctgaagggactggacgacctgatgtccggcctgggagctgccggcaaggctgtgggtgtcgctatcggtgctgtgggtggtgctgtggcttccgtggtcgagggtgtcgccaccttcctgaagaaccccttcggtgctttcaccatcatcctggtggctatcgctgtggtcatcatcatctacctgatctacacccgtcagcgtcgtctgtgcatgcagcccctgcagaacctgttcccctacctggtgtccgctgacggtactaccgtgacctccggcaacaccaaggacacctccctgcaggctcccccatcctacgaggaatccgtctacaactccggtcgcaagggtcccggtcccccttcctccgacgcttctaccgctgctcccccatacaccaacgagcaggcttaccagatgctgctggctctcgtgcgtctggacgctgagcagcgtgcacagcagaacggcaccgactccctggacggccagaccggaacccaggacaagggccagaagcccaacctgctggaccgtctgcgtcaccgcaagaacggttaccgtcacctgaaggactccgacgaggaagagaacgtctaaggcgcgccaagcttgtcgagaagtactagagatcataatcagccataccacatttgtagaggttttacttgctttaaaaaacctcccacacctccccctgaacctgaaacataaaatgaatgcaattgttgttgttaacttgtttattgcagcttataatggttacaaataaagcaatagcatcacaaatttcacaaataaagcatttttttcactgcattctagttgtggtttgtccaaactcatcaatgtatcttatcatgtctggatctgatcactgcttgagcctagaagatccggctgctaacaaagcccgaaaggaagctgggaatattaatagatcatggagataattaaaatgataaccatctcgcaaataaataagtattttactgttttcgtaacagttttgtaataaaaaaacctataaatattccggattattcataccgtcccaccatcgggcgcggatccgccaccatgcgtcccggcctgccctcctacctgatcgtgctggctgtgtgcctgctgtcccacctcctgtcctcccgttacggtgctgaggctatctccgagcccctggacaaggctttccacctcctgctgaacacctacggtcgtcctatccgtttcctgcgcgagaacaccacccagtgcacctacaactcctccctgcgcaactccaccgtcgtccgcgagaacgctatctccttcaacttcttccagtcctacaaccagtactacgtgttccacatgccccgttgcctgttcgctggtcccctggctgagcagttcctgaaccaggtggacctgaccgagactctcgagcgttaccagcagcgtctgaacacttacgctctggtgtccaaggacctggcttcctaccgttccttcagccagcagctgaaggctcaggactccctgggcgagcagcccaccactgtgcctccccctatcgacctgtccatcccccacgtgtggatgcccccccagaccactcctcacggctggaccgagtcccacaccacctccggactgcaccgtccccacttcaaccagacctgcatcctgttcgacggtcacgacctgctgttctccaccgtgaccccctgcctgcaccagggcttctacctcatcgacgagctgcgttacgtgaagatcaccctgaccgaggatttcttcgtggtcaccgtgtccatcgacgacgacacccccatgctgctgatcttcggtcacctcccccgtgtgctgttcaaggctccctaccagcgtgacaacttcatcctgcgtcagaccgagaagcacgagctgctggtgctggtcaagaaggaccagctgaaccgtcactcttacctgaaggaccccgacttcctggacgctgctctggacttcaactacctggacctgtccgctctgctgaggaactccttccaccgttacgctgtggacgtgctgaagtccggtcgttgccagatgctggaccgtcgtaccgtcgagatggctttcgcttacgccctggctctgttcgctgctgctcgtcaagaagaggctggcgctcaggtgtccgtgccccgtgctctggaccgtcaggctgctctgctgcagatccaagagttcatgatcacttgcctgtcccagaccccccctcgtaccaccctgctgctgtaccccaccgctgtggacctggctaagcgtgctctgtggacccccaaccagatcaccgacatcacctccctcgtgcgtctggtgtacatcctgtccaagcagaaccagcagcacctgatcccccagtgggctctgcgtcagatcgctgacttcgctctgaagctgcacaagacccacctggcttcattcctcagcgctttcgctcgccaagagctgtacctgatgggttccctggtgcactccatgctggtgcacaccaccgagcgtcgcgagatcttcatcgtggaaaccggcctgtgctccctggccgagctgtcccacttcacccagctgctggctcacccccaccacgagtacctgtccgacctgtacaccccctgctcctcttccggtcgtcgtgaccactccctggaacgtctgacccgtctgttccccgacgctaccgtgcctaccaccgtgcctgctgctctgtccatcctgtctaccatgcagccctccaccctggaaaccttccccgacctgttctgcctgcctctgggcgagtccttctccgctctgaccgtgtccgagcacgtgtcctacgtggtcaccaaccagtacctgatcaagggcatctcctaccccgtgtccaccaccgtcgtgggccagtccctgatcatcacccagaccgactcccagaccaagtgcgagctgacccgtaacatgcacaccactcactccatcaccgctgctctgaacatctccctcgagaactgcgctttctgccagtccgctctgttggagtacgacgacactcagggtgtcatcaacatcatgtacatgcacgactccgacgacgtgctgttcgctctggacccctacaacgaggtggtggtgtcctccccccgtacccactacctgatgctgctgaagaacggcaccgtgctggaagtgaccgacgtggtggtggacgctaccgaccgtctgctgatgatgtccgtgtacgctctgtccgctatcatcggcatctacctgctgtaccgtatgctgaagacctgctaaggcgccaagctttgtcgagaagtactagaggatcataatcagccataccacatttgtagaggttttacttgctttaaaaaacctcccacacctccccctgaacctgaaacataaaatgaatgcaattgttgttgttaacttgtttattgcagcttataatggttacaaataaagcaatagcatcacaaatttcacaaataaagcatttttttcactgcattctagttgtggtttgtccaaactcatcaatgtatcttatcatgtctggatctgatcactgcttgagcctagaagatccggctgctaacaaagcccgaaaggaagctgagttggctgctgccaccgctgagcaataactatcataacccctaggagatccgaaccagataagtgaaatctagttccaaactattttgtcatttttaattttcgtattagcttacgacgctacacccagttcccatctattttgtcactcttccctaaataatccttaaaaactccatttccacccctcccagttcccaactattttgtccgcccaca

SEQ ID NO: 45 - DNA, 29499 bp, Artificial Sequence
  Synthetic construct
ttgttccagtttggaacaagagtccactattaaagaacgtggactccaacgtcaaagggcgaaaaaccgtctatcagggcgatggcccactacgtgaaccatcaccctaatcaagttttttggggtcgaggtgccgtaaagcactaaatcggaaccctaaagggagcccccgatttagagcttgacggggaaagccggcgaacgtggcgagaaaggaagggaagaaagcgaaaggagcgggcgctagggcgctggcaagtgtagcggtcacgctgcgcgtaaccaccacacccgccgcgcttaatgcgccgctacagggcgcgtccattcgccattcaggctgcgcaactgttgggaagggcgatcggtgcgggcctcttcgctattacgccagctggcgaaagggggatgtgctgcaaggcgattaagttgggtaacgccagggttttcccagtcacgacgttgtaaaacgacggccagtgcatagaccagccgcgtaacctggcaaaatcggttacggttgagtaataaatggatgccctgcgtaagcgggtgtgggcggacaataaagtcttaaactgaacaaaatagatctaaactatgacaataaagtcttaaactagacagaatagttgtaaactgaaatcagtccagttatgctgtgaaaaagcatactggacttttgttatggctaaagcaaactcttcattttctgaagtgcaaattgcccgtcgtattaaagaggggcgtggccaagggcatggtaaagactatattcgcggcgttgtgacaatttaccgaacaactccgcggccgggaagccgatctcggcttgaacgaattgttaggtggcggtacttgggtcgatatcaaagtgcatcacttcttcccgtatgcccaactttgtatagagagccactgcgggatcgtcaccgtaatctgcttgcacgtagatcacataagcaccaagcgcgttggcctcatgcttgaggagattgatgagcgcggtggcaatgccctgcctccggtgctcgccggagactgcgagatcatagatatagatctcactacgcggctgctcaaacttgggcagaacgtaagccgcgagagcgccaacaaccgcttcttggtcgaaggcagcaagcgcgatgaatgtcttactacggagcaagttcccgaggtaatcggagtccggctgatgttgggagtaggtggctacgtctccgaactcacgaccgaaaagatcaagagcagcccgcatggatttgacttggtcagggccgagcctacatgtgcgaatgatgcccatacttgagccacctaactttgttttagggcgactgccctgctgcgtaacatcgttgctgctgcgtaacatcgttgctgctccataacatcaaacatcgacccacggcgtaacgcgcttgctgcttggatgcccgaggcatagactgtacaaaaaaacagtcataacaagccatgaaaaccgccactgcgccgttaccaccgctgcgttcggtcaaggttctggaccagttgcgtgagcgcatacgctacttgcattacagtttacgaaccgaacaggcttatgtcaactgggtttgtgccttcatccgtttccacggtgtgcgtcacccggcaaccttgggcagcagcgaagtcgaggcatttctgtcctggctggcgaacgagcgcaaggtttcggtctccacgcatcgtcaggcattggcggccttgctgttcttctacggcaaggtgctgtgcacggatctgcccttgcttcaggagatcggtagacctcggccgtcgcggcgcttgccggtggtgctgaccccggatgaagtggttcgcatcctcggttttctggaaggcgagcatcgtttgttcgcccaggactctagctatagttctagtggttggctacagctttgtttgtactatcaacaggttgaactgctgatcaacagatcctctacgcggccgcggtaccataacttcgtatagcatacattatacgaagttatctggtttaaacgtacccgtagtggctatggcagggcttgccgccccgacgttggctgcgagccctgggccttcacccgaacttgggggttggggtggggaaaaggaagaaacgcgggcgtattggtcccaatggggtctcggtggggtatcgacagagtgccagccctgggaccgaaccccgcgtttatgaacaaacgacccaacacccgtgcgttttattctgtctttttattgccgtcatagcgcgggttccttccggtattgtctccttccgtgtttcagttagcctcccccatctcccggtaccgcatgctatgcatcagctgctagcaccatggctcgagatcccgggtgatcaagtcttcgtcgagtgattgtaaataaaatgtaatttacagtatagtattttaattaatatacaaatgatttgataataattcttatttaactataatatattgtgttgggttgaattaaaggtccgtatactagtatcgattcgcgacctactccggaatattaatagatcatggagataattaaaatgataaccatctcgcaaataaataagtattttactgttttcgtaacagttttgtaataaaaaaacctataaatattccggattattcataccgtcccaccatcgggcgcggatccgccaccatggaaaactggtccgctctggaactgctgcccaaggtcggaatccctaccgacttcctgacccacgtcaagacctccgctggcgaggaaatgttcgaggctctgaggatctactacggcgacgaccccgagcgttacaacatccacttcgaggctatcttcggcaccttctgcaaccgtctggaatgggtgtacttcctgacttccggcctggctgctgctgctcacgctatcaagttccacgacctgaacaagctgaccaccggcaagatgctgttccacgtgcaagtgccccgtgtggcttccggtgctggcctgcctacctcccgtcagaccaccatcatggtcaccaagtactccgagaagtcccccatcaccatccctttcgagctgtccgctgcttgcctgacttacctgcgtgaaaccttcgagggcaccatcctggacaagatcctgaacgtcgaggctatgcacaccgtgctgcgtgctctgaagaacaccgctgacgctatggaacgtggcctgatccacagcttcctccagaccctgctgaggaaggctcccccctacttcgtggtgcagaccctggtcgagaacgctaccctggctcgtcaggctctgaaccgtatccagcgctccaacatcctgcagtccttcaaggctaagatgctggctaccctgttcctgctgaaccgtacccgtgaccgtgactacgtgctgaagttcctgacccgtctggctgaggctgctaccgactccatcctcgacaaccctactacctacaccacctcctccggtgctaagatctccggtgtcatggtgtccaccgctaacgtgatgcagatcatcatgtccctgctgtcctcccacatcactaaggaaaccgtgtccgctcccgctacctacggcaacttcgtgctgtcccccgagaacgctgtgaccgctatctcctaccactctatcctggctgacttcaactcctacaaggctcacctgacctccggccagccccacctccccaacgactccctgagccaggctggtgctcactccctgacccccctgtccatggacgtgatccgtctgggcgaaaagaccgtgatcatggaaaacctgcgtcgcgtgtacaagaacaccgacaccaaggaccccctggaacgtaacgtggacctgaccttcttcttccccgtgggcctgtacctgcccgaggaccgtggttacaccaccgtcgagtccaaggtcaagctgaacgacaccgtgcgtaacgctctgcccaccaccgcttacctgctgaacagggaccgtgctgtgcaaaagatcgacttcgtggacgctctcaagaccctgtgccaccccgtgctgcacgagcctgctccatgcctgcaggctttcaccgagcgtggtcccccatccgagcccgctatgcagcgtctgctggaatgccgtttccagcaagagcccatgggtggtgctgctcgtcgtatcccccacttctaccgtgtgcgccgcgaggtgccccgtaccgtgaacgagatgaagcaggacttcgtggtcaccgacttctacaaggttggaaacatcaccctgtacaccgagctgcaccctttcttcgacttcacccactgccaagagaactccgagactgtggctctgtgcaccccccgtatcgtgatcggcaacctgcccgacggcctggctcccggtcccttccacgagctgaggacctgggagatcatggaacacatgcgcctgcgtcccccacccgactacgaggaaaccctgcgtctgttcaagaccaccgtgacctcccccaactaccccgagctgtgctacctggtggacgtgctggtgcacggcaacgctgacgctttcctgctgatccgcgctttcatcgctcgttgcatcgtgaacatgttccacacccgtcagctgctggtgttcgctcactcctacgctctggtcaccctgatcgctgagcacctggctgacggtgctctgcccccccagctcctgttccactaccgtaacctggtggctgtgctgcgcctggtcacccgtatctccgctctgcccggcctgaacaacggccagctggctgaggaacccctgtccgcttacgtgaacgctctgcacgaccacaggctgtggccccccttcgtgacccacctccctcgtaacatggaaggtgtccaggtggtggctgatcgtcagcccctgaaccccgctaacatcgaggctcgtcaccacggtgtctccgacgtgccccgtctgggtgctatggacgctgacgagcccctgttcgtggacgactaccgtgctaccgacgacgagtggaccctgcaaaaggtgttctacctgtgcctgatccccgctatgaccaacaaccgtgcttgcggcctgggcctgaacctcaagactctgctggtggacctgttctaccgtcccgccttcctgctcatgcccgctgctaccgctgtgtccacctccggcaccacctccaaggaatccacctctggtgtcacccccgaggactccgtggctgctcagcgtcaggctgtgggcgagatgctgaccgagctggtcgaggacgtggccaccgacgctcacacccctctgctgcaggcttgccgcgagctgttcctggctgtgcagttcgtgggcgagcacgtgaaggtgctggaagtgcgtgctcccctggaccacgctcagaggcagggactgcccgacttcatctcccgtcagcatgtgctgtacaacggttgctgcgtcgtgaccgctcctaagaccctgatcgagtactccctgcccgtgcccttccaccgtttctactccaaccccaccatctgcgctgctctgtccgacgacatcaagcgttacgtgaccgagttcccccactaccatagacacgatggtggtttccccctgcccaccgctttcgctcacgagtaccacaactggctgcgtagccccttctcccgttactccgctacctgccccaacgtgctgcactccgtgatgaccctggctgctatgctgtacaagatctcccccgtgtccctggtgctgcagaccaaggctcacatccaccccggtttcgctctgaccgctgtgcgtaccgacaccttcgaggtggacatgctgctgtactccggcaagtcctgcacctccgtcatcatcaacaaccccatcgtgaccaaggaagagagggacatctccaccacctaccacgtgacccagaacatcaacaccgtggacatgggcctgggttacacctccaacacttgcgtggcctacgtgaaccgcgtccgcaccgacatgggtgtccgtgtgcaggacctgttccgtgtgttccccatgaacgtgtaccgccacgatgaggtggaccgttggatcaggcacgctgctggcgtcgagcgtccccagctgctggacaccgagactatctccatgctgaccttcggttccatgtccgagcgcaacgctgctgctaccgtgcacggccagaaggctgtctgcgagctgatcctgacccctgtgactatggacgtgaactacttcaagatcaccaacaaccctcgtggtcgtgcttcctgcatgctgggcgtggacccctacgacaccgaggctgccaccaaggctatctacgaccaccgcgaggctgacgctcagaccttcgctgctacccacaacccatgggcttcccaggctggttgcctgtccgacgtcctgtacaacacccgtcaccgcgagcgtctgggctacaactccaagttctactccccctgcgctcagtacttcaacaccgaggaaatcatcgctgccaacaagaccctcttcaagaccatcgacgagtacctgctgcgcgctaaggactgcatccgtggcgacaccgacactcagtacgtgtgcgtcgagggaaccgagcagctgatcgagaacccttgccgtctgacccaagaggctctgcccatcctgtccaccaccaccctggctctgatggaaactaagctgaagggtggcgctggtgctttcgctacctccgagactcacttcggcaactacgtcgtgggagagatcatccccctgcagcagtccatgctgttcaacagctaagagctcaagcttgtcgagaagtactagaggatcataatcagccataccacatttgtagaggttttacttgctttaaaaaacctcccacacctccccctgaacctgaaacataaaatgaatgcaattgttgttgttaacttgtttattgcagcttataatggttacaaataaagcaatagcatcacaaatttcacaaataaagcatttttttcactgcattctagttgtggtttgtccaaactcatcaatgtatcttatcatgtctggatctgatcactgcttgagcctagaagatccggctgctaacaaagcccgaaaggaagctgagttggctgctgcccaccgctgagcaataactatcataacccccggaatattaatagatcatggagataattaaaatgataaccatctcgcaaataaataagtattttactgttttcgtaacagttttgtaataaaaaaacctataaatattccggattattcataccgtcccaccatcgggcgcggatccgccaccatggctgctatggaagctaacatcttctgcaccttcgaccacaagctgtctatcgctgacgtgggcaagctgaccaagctggtggctgctgtggtgcccatcccccagcgtctgcacctgatcaagcactaccagctgggcctgcaccagttcgtggaccacacccgtggttacgtgcgtctgcgtggcctgctgcgtaacatgaccctgaccctgatgcgtcgtgtcgagggcaaccagatcctgctgcacgtgcccacccacggcctgctgtacaccgtgctgaacaccggtcccgtgacctgggagaagggcgacgctctgtgcgtgctgccccccctgttccacggtcccctggctcgtgaaaacctgttgaccctgggccagtgggagctggtgctgccctggatcgtgcccatgcccctggctctggaaatcaaccagcgcctgctgatcatgggcctgttctccctggaccgttcctacgaagaagtgaaggctgctgtccagcagctgcagaccatcaccttccgtgacgctaccttcaccatccccgaccccgtgatcgaccagcacctcctgatcgacatgaagaccgcttgcctgtccatgtccatggtggctaacctggcttccgagctgaccatgacctacgtccgcaagctggctttggaggactcttccatgctgctggtcaagtgccaagagctgctgatgcgtctggaccgcgagcgttccgtgggcgagcctcgtactcccgctcgtcctcagcacgtgtcccccgacgacgagatcgctcgtctgtccgctctgttcgtgatgctgcgtcagctggacgacctgatccgcgagcaggtcgtgttcaccgtgtgcgacgtgagcccagacaacaagtccgctacctgcatcttcaagggctaaggcgcgccaagcttgtcgagaagtactagaggatcataatcagccataccacatttgtagaggttttacttgctttaaaaaacctcccacacctccccctgaacctgaaacataaaatgaatgcaattgttgttgttaacttgtttattgcagcttataatggttacaaataaagcaatagcatcacaaatttcacaaataaagcatttttttcactgcattctagttgtggtttgtccaaactcatcaatgtatcttatcatgtctggatctgatcactgcttgagcctagaagatccggctgctaacaaagcccgaaaggaagctgagttggctgctgccaccgctgagcaataactatcataacccccggaatattaatagatcatggagataattaaaatgataaccatctcgcaaataaataagtattttactgttttcgtaacagttttgtaataaaaaaacctataaatattccggattattcataccgtcccaccatcgggcgcggatcccggtccgaagcgcgcggaattcaaaggcctgccaccatggaaatgaacaaggtgctgcatcaggatctggtgcaggctacccgtcgtatcctgaagctgggcccctccgagctgcgtgtgaccgacgctggcctgatctgcaagaaccccaactactccgtgtgcgacgctatgctcaagaccgacaccgtgtactgcgtcgagtacctgctgtcctactgggagtcccgtaccgaccacgtgccctgcttcatcttcaagaacaccggttgcgctgtgtccctgtgctgcttcgtgcgtgctcccgtgaagctggtgtcccctgctcgtcacgtgggcgagttcaacgtgctgaaggtcaacgagtccctgatcgtgaccctgaaggacatcgaggaaatcaagccctccgcttacggtgtcctgactaagtgcgtcgtccgcaagtccaactccgcttccgtgttcaacatcgagctgatcgctttcggtcccgagaacgagggcgagtacgagaacctgctgcgcgagctgtacgctaagaaggctgcttccacctccctggctgtgcgtaaccacgtgaccgtgtcctcccactccggttccggtccctccctgtggcgtgctcgtatgtccgctgctctgacccgtaccgctggcaagcgctcctccaggactgctagccctccaccaccacctcctcgtcaccctagctgctctcccactatggtggctgctggtggagctgctgctggtcctagacctccccctcctcctatggctgctggatcctggcgtctgtgccgttgcgaggcttgcatgggccgttgcggttgcgcttccgagggcgacgctgacgaggaagaggaagagttgctggctctggctggcgagggcaaggctgctgctgccgctgccggtcaagacgtcggtggttccgctcgtcgtcccctcgaggaacacgtgtcccgtcgtcgtggtgtctccacccaccaccgtcaccccccttccccaccttgcgctccctccctggaacgtaccggttaccgttgggctccttcctcctggtggcgcgctcgttctggtccttcccgtccccagtccggtccctggctgcctgctcgtttcgctaccctgggtcccctggtcctggctctgctgttggtgctggccctgctgtggcgtggtcacggtcaatcccccagccccacccgttccgctcaccgtgactaaaagcttgtcgagaagtactagaggatcataatcagccataccacatttgtagaggttttacttgctttaaaaaacctcccacacctccccctgaacctgaaacataaaatgaatgcaattgttgttgttaacttgtttattgcagcttataatggttacaaataaagcaatagcatcacaaatttcacaaataaagcatttttttcactgcattctagttgtggtttgtccaaactcatcaatgtatcttatcatgtctggatctgatcactgcttgagcctagaagatccggctgctaacaaagcccgaaaggaagctgagttggctgctgtggctagctttgtttaactttaagaaggagatacatctagaaatattaatagatcatggagataattaaaatgataaccatctcgcaaataaataagtattttactgttttcgtaacagttttgtaataaaaaaacctataaatattccggattattcataccgtcccaccatcgggcgcggatcccggtccgaagcgcgcggaattcaaaggcctacgtcgacgccaccatgtccaacaccgctcccggtcccaccgtggctaacaagcgtgacgagaagcaccgtcacgtggtcaacgtggtgctcgagctgcccaccgagatctccgaggctacccaccccgtgctggctaccatgctgtccaagtacacccgtatgtcctccctgttcaacgacaagtgcgctttcaagctggacctgctgcgtatggtggctgtgtcccgtacccgtcgctaaaagcttgtcgagaagtactagaggatcataatcagccataccacatttgtagaggttttacttgctttaaaaaacctcccacacctccccctgaacctgaaacataaaatgaatgcaattgttgttgttaacttgtttattgcagcttataatggttacaaataaagcaatagcatcacaaatttcacaaataaagcatttttttcactgcattctagttgtggtttgtccaaactcatcaatgtatcttatcatgtctggatctgatcactgcttgagcctagaagatccggctgctaacaaagcccgaaaggaagctgagttggctgctgggtgcctaatgagtgagctaactcacattaattgcccggaatattaatagatcatggagataattaaaatgataaccatctcgcaaataaataagtattttactgttttcgtaacagttttgtaataaaaaaacctataaatattccggattattcataccgtcccaccatcgggcgcggatcccggtccgaagcgcgcggaattcgccaccatggacgctcgtgctgtggctaagcgtccccgtgaccccgctgacgaggacaacgagctggtcaccgctctgaaggctaagcgtgaagtgaacaccatctccgtgcgttacctgtaccacgctgaccaccaggctctgaccgctcgtttcttcgtgcccgagggcctggtcgagttcgaggctcagcccggtgctctgctgatccgtatggaaaccggttgcgactccccccgtcacctgtacatctccctgtacctgctgggtatccgtgcttccaacgtgtccgcttccacccgttgcctgctcgagtccgtgtacaccgcttccgctgctcgtgctgctctgcagtggctggacctgggtccccacctcctgcaccgtcgtctggaaaccctgggttgcgtcaagaccgtgtccctgggtatcacctccctgctgacctgcgtgatgcgcggctacctgtacaacaccctcaagaccgaggtgttcgctctgatgatccccaaggacatgtacctgacctgggaggaaacccgcggtcgtctgcagtacgtgtacctgatcatcgtgtacgactacgacggtcccgagactcgtcccggtatctacgtgctgacctcctctatcgctcactggcagaccctggtggacgtggcccgtggaaagttcgctcgtgaacgctgctccttcgtgaaccgtcgtatcacccgtccccgtcagatccccctgtgcaccggtgtcatccaaaagctgggctggtgcctggctgacgacatccacacctcattcctcgtgcacaaggaactgaagctgtccgtcgtgcgtctggacaacttctccgtcgagctgggcgacttccgcgagttcgtgcagctgttgaattttgaccttcttaagcttgcgggagacgtcgagtccaaccctgggcccatggaatcccgtggtcgtcgttgccccgagatgatctccgtgctgggtcccatctccggtcacgtcctgaaggctgtgttctcccgtggcgacacccccgtgctgccccacgaaactcgtctgctgcagaccggtatccacgtgcgtgtgtcccagccctccctgatcctggtgtcccagtacacccccgactccaccccttgccaccgcggagacaaccagctgcaggtccagcacacctacttcaccggttccgaggtcgagaacgtgtccgtgaacgtgcacaaccccaccggtcgttccatctgcccctcccaagagcccatgtccatctacgtgtacgctctgcccctgaagatgctgaacatcccctccatcaacgtgcaccactacccctccgctgctgagcgcaagcaccgtcacctccccgtggctgacgctgtgatccacgcttccggcaagcagatgtggcaggctcgtctgaccgtgtccggcctggcttggacccgtcagcagaaccagtggaaggaacccgacgtgtactacacctccgctttcgtgttccccaccaaggacgtggccctgcgtcacgtcgtgtgcgctcacgaactcgtgtgctccatggaaaacacccgtgctaccaagatgcaagtgatcggcgaccagtacgtgaaggtgtacctggaatccttctgcgaggacgtgccctccggcaagctgttcatgcacgtgaccctgggttccgacgtggaagaggacctgaccatgacccgtaacccccagcccttcatgcgtccccacgagcgtaacggtttcaccgtgctgtgccccaagaacatgatcatcaagcccggcaagatctcccacatcatgctggacgtggccttcacctcccacgagcacttcggcctgctgtgccctaagtccatccccggcctgtccatctccggcaacctgctgatgaacggccagcagatcttcctggaagtgcaggctatccgtgaaaccgtcgagctgcgtcagtacgaccctgtggctgctctgttcttcttcgacatcgacctgctgctgcagcgtggtccccagtactccgagcaccccaccttcaccagccagtaccgtatccagggcaagctggaataccgtcacacctgggaccgtcacgacgagggtgctgctcagggcgacgacgacgtgtggacctccggttccgactccgacgaggaactggtcaccaccgagcgcaagaccccccgtgtgaccggtggtggtgctatggctggtgcttccacctccgctggtcgcaagcgcaagtccgcttcctccgctaccgcttgcaccgctggtgtcatgacccgtggtcgcctgaaggctgagtccaccgtggctcccgaagaggacactgacgaggactccgacaacgagatccacaaccccgctgtgttcacctggcccccctggcaggctggtatcctggctcgtaacctggtgcccatggtggctaccgtgcagggccagaacctgaagtaccaagagttcttctgggacgccaacgacatctaccgtatcttcgctgagctggaaggcgtgtggcagcccgctgctcagcccaagcgtcgtcgtcaccgtcaggacgctctgcctggtccctgtatcgcttccacccccaagaagcaccgcggctaaaagcttgtcgagaagtactagaggatcataatcagccataccacatttgtagaggttttacttgctttaaaaaacctcccacacctccccctgaacctgaaacataaaatgaatgcaattgttgttgttaacttgtttattgcagcttataatggttacaaataaagcaatagcatcacaaatttcacaaataaagcatttttttcactgcattctagttgtggtttgtccaaactcatcaatgtatcttatcatgtctggatctgatcactgcttgagcctagaagatccggctgctaacaaagcccgaaaggaagctgagttggctgctgtggctagctttgtttaactttaagaaggagatacatctagacctgcaggccggaatattaatagatcatggagataattaaaatgataaccatctcgcaaataaataagtattttactgttttcgtaacagttttgtaataaaaaaacctataaatattccggattattcataccgtcccaccatcgggcgcggatcccggtccgaagcgcgcggaattcgccaccatgaccatggacgagcagcagccccaggctgtgacccccgtgtacgtgggcggtttcctggctcgttacgaccagtcccccgacgaggctgagctgctgctgccacgtgacgtggtcgaacactggctgcacgctcagggccagggacagccttccctgtccgtggctctgcccctgaacatcaaccacgacgacaccgctgtcgtgggtcacgtggccgctatgcagtccgtgcgtgacggcctgttctgcctgggttgcgtgacctccccccgtttcctggaaatcgtgcgtcgtgcttccgagaagtccgagctggtgtcccgtggtcccgtgtccccactgcagcccgacaaggtggtcgagttcctgtccggttcctacgctggcctgtccctgtcatcccgtcgttgcgacgacgtcgaggctgctacctccctgagcggctccgagactacccccttcaagcacgtggccctgtgctccgtgggtcgtaggcgtggaaccctggctgtgtacggtcgtgaccccgagtgggtcacccagcgtttccccgacctgaccgctgctgaccgtgacggactgcgtgctcagtggcagcgttgcggttccaccgctgtggacgcttccggcgaccccttccgttccgactcctacggcctgctgggcaactccgtggacgctctgtacatccgcgagcgtctgcccaagctgcgttacgacaagcagctcgtgggtgtcaccgagcgcgagtcctacgtgaaggcttccgtgtcccccgaggctgcttgcgacatcaaggctgcttccgctgagcgttctggcgacagccgctcccaggctgctactcctgctgctggtgctcgtgtgccctccagctccccatccccacctgtcgagcctccctcccccgtgcaacctcctgctctgcctgcttccccctccgtgctgcctgctgagtccagcccctccctgtcaccctctgagcctgctgaggctgcctccatgtcccaccctctgagcgctgctgtgactgctgctaccgctccccctggtgctactgtggctggtgcttcccccgctgtgccttccctggcttggcctcacgacggtgtctacctgcccaaggacgctttcttctccctgctgggcgcttcccgttccgctgctcccgtgatgtaccccggtgctgtggctgctccccccagcgcttcacctgctcctctgcccctgccctcctaccccgcttcctacggtgctcccgtcgtgggttacgaccagctggctgctcgtcacttcgctgactacgtggacccccactaccccggctggggtcgtcgttacgagcccgctccttccctgcacccatcctaccctgtgccccctcctccatcacccgcttactaccgtcgtcgtgactcccccggtggcatggacgagcctccatctggatgggagcgttacgacggttcccaccgtggccagtcccaaaagcagcaccgtcacggtggttccggtggtcacaacaagcgtcgcaaggaagccgctgctgcatcctccagctccgacgaggacctgagcttccccggcgaggctgaacacggtcgtgctcgcaagcgtctgaagtcccacgtgaactccgacggaggtagcggaggccacgctggttccaaccagcagcagcaacagcgctacgacgagctgcgtgacgctatccacgagctgaagcgtgacctgttcgctgctcgccagtcctccaccctgctgtctgctgctctgccagctgccgcttcttcctcccctaccaccaccaccgtgtgcacccctactggcgagctgacctctggtggtggcgagactcccaccgctctgctgtccggtggtgctaaggtggccgagcgtgctcaggctggtgtcgtgaacgcttcctgccgtctggctaccgcttccggttccgaggctgccaccgctggtccctctaccgctggttcctcatcctgcccagcttccgtggtgctggctgccgctgctgctcaagccgccgctgcttcacagtcccccccaaaggatatggtggacctgaaccgtcgtatcttcgtggctgctctgaacaagctcgagtaataaaagcttgtcgagaagtactagaggatcataatcagccataccacatttgtagaggttttacttgctttaaaaaacctcccacacctccccctgaacctgaaacataaaatgaatgcaattgttgttgttaacttgtttattgcagcttataatggttacaaataaagcaatagcatcacaaatttcacaaataaagcatttttttcactgcattctagttgtggtttgtccaaactcatcaatgtatcttatcatgtctggatctgatcactgcttgagcctagaagatccggctgctaacaaagcccgaaaggaagctgagttggctgctgccaccgctgagcaataactatcataacccctaggggcctctaaacgggtcttgaggggttttttgctgaaaggaggaactatatccggatctgaacaggagggacagctgatagaaacagaagccactggagcacctcaaaaacaccatcatacactaaatcagtaagttggcagcatcacccgacgcactttgcgccgaataaatacctgtgacggaagatcacttcgcagaataaataaatcctggtgtccctgttgataccgggaagccctgggccaacttttggcgaaaatgagacgttgatcggcacgtaagaggttccaactttcaccataatgaaataagatcactaccgggcgtattttttgagttatcgagattttcaggagctaaggaagctaaaatggagaaaaaaatcactggatataccaccgttgatatatcccaatggcatcgtaaagaacattttgaggcatttcagtcagttgctcaatgtacctataaccagaccgttcagctggatattacggcctttttaaagaccgtaaagaaaaataagcacaagttttatccggcctttattcacattcttgcccgcctgatgaatgctcatccggaattccgtatggcaatgaaagacggtgagctggtgatatgggatagtgttcacccttgttacaccgttttccatgagcaaactgaaacgttttcatcgctctggagtgaataccacgacgatttccggcagtttctacacatatattcgcaagatgtggcgtgttacggtgaaaacctggcctatttccctaaagggtttattgagaatatgtttttcgtctcagccaatccctgggtgagtttcaccagttttgatttaaacgtggccaatatggacaacttcttcgcccccgttttcaccatgggcaaatattatacgcaaggcgacaaggtgctgatgccgctggcgattcaggttcatcatgccgtttgtgatggcttccatgtcggcagaatgcttaatgaattacaacagtactgcgatgagtggcagggcggggcgtaatttttttaaggcagttattggtgcccttaaacgcctggttgctacgcctgaataagtgataataagcggatgaatggcagaaattcgaaagcaaattcgacccggtcgtcggttcagggcagggtcgttaaatagccgcttatgtctattgctggtttaccggtttattgactaccggaagcagtgtgaccgtgtgcttctcaaatgcctgaggccagtttgctcaggctctccccgtggaggtaataattgacgatatgatcatttattctgcctcccagctgacattcatccggggtcagcaccgtttctgcggactggctttctacgtgttccgcttcctttagcagcccttgcgccctgagtgcttgcggcagcgtgaagctaattctgtcagccgttaagtgttcctgtgtcactcaaaattgctttgagaggctctaagggcttctcagtgcgttacatccctggcttgttgtccacaaccgttaaaccttaaaagctttaaaagccttatatattcttttttttcttataaaacttaaaaccttagaggctatttaagttgctgatttatattaattttattgttcaaacatgagagcttagtacgtgaaacatgagagcttagtacgttagccatgagagcttagtacgttagccatgagggtttagttcgttaaacatgagagcttagtacgttaaacatgagagcttagtacgtgaaacatgagagcttagtacgtactatcaacaggttgaactgctgatcaacagatcctctacgcggccgcggtaccataacttcgtatagcatacattatacgaagttatctggtttaaacgtacccgtagtggctatggcagggcttgccgccccgacgttggctgcgagccctgggccttcacccgaacttgggggttggggtggggaaaaggaagaaacgcgggcgtattggtcccaatggggtctcggtggggtatcgacagagtgccagccctgggaccgaaccccgcgtttatgaacaaacgacccaacacccgtgcgttttattctgtctttttattgccgtcatagcgcgggttccttccggtattgtctccttccgtgtttcagttagcctcccccatctcccggtaccgcatgctatgcatcagctgctagcttagcgagcgtccacagcctggggaccgtaacgggagtgagcgggcaggttcacacgggtctgcttcagctcagggggcaggccagcgtagtacttgtccaggtgacgcagcaggggggggtccagctggtgacgcaggcagaattccttcacagcgttgtacaggccgtagaacagggtgataccctcgggagcagcagcggtggacacgggcagacgcacagcacggttggtacgggtagcctcgttacggatagccaccaccacgttgaacagggaggggggcaccagctcgaaacccagcacgtgttcggtgaagatggaacgaccgtaggacagacgagtcaggtcgtaaccacggcacaggtcgtccacgcaagtgtacacagcgggggaaccgtcgccgcactcggagtaaccgcgcatcacggtcatccaacggggagcggtgtcggaggacagcagggtcagcagagcacgcagctggtcggggttgttgtacagcagggccagggtgtccaggaaagcgtcgtccagcagcacggagttagcagcctcgggggtcacgggacggtaacggatcagctgggacaggggaccgtccctacgggtcacgttgaccaggggacgcagccaggactcgtacttgtcgccctggaacacctctcccagcaggcaacgacgggtcagctcggggcactcagcgggcaccttctcagccacggtgggagccacggacacggtagcggaggacacgatgggcagcagcaggcagcaccacagcagagccacgggaccgggggagaaggagaaaccgcagtcgggacgacggcacatggtggctcgagatcccgggtgatcaagtcttcgtcgagtgattgtaaataaaatgtaatttacagtatagtattttaattaatatacaaatgatttgataataattcttatttaactataatatattgtgttgggttgaattaaaggtccgtatactagtatcgattcgcgacctactccggaatattaatagatcatggagataattaaaatgataaccatctcgcaaataaataagtattttactgttttcgtaacagttttgtaataaaaaaacctataaatattccggattattcataccgtcccaccatcgggcgcggatccgccaccatgtcccccaagaacctgacccccttcctgaccgctctgtggctgctgctgggccactcccgtgtgcctcgtgtgcgtgctgaggaatgctgcgagttcatcaacgtgaaccacccccccgagcgctgctacgacttcaagatgtgcaaccgtttcaccgtggctctgcgttgccccgacggcgaagtgtgctactcccccgaaaagaccgctgagatccgtggtatcgtgaccaccatgacccactccctgacccgtcaggtggtgcacaacaagctgacctcttgcaactacaaccccctgtacctcgaggctgacggtcgtatccgttgcggcaaggtcaacgacaaggctcagtacctgctgggtgctgctggttccgtgccctaccgttggatcaacctcgagtacgacaagatcacccgtatcgtgggcctggaccagtacctcgagtccgtgaagaagcacaagcgtctggacgtgtgccgtgctaagatgggttacatgctgcagtaaaagcttgtcgagaagtactagaggatcataatcagccataccacatttgtagaggttttacttgctttaaaaaacctcccacacctccccctgaacctgaaacataaaatgaatgcaattgttgttgttaacttgtttattgcagcttataatggttacaaataaagcaatagcatcacaaatttcacaaataaagcatttttttcactgcattctagttgtggtttgtccaaactcatcaatgtatcttatcatgtctggatctgatcactgcttgagcctagaagatccggctgctaacaaagcccgaaaggaagctgagttggctgctgtggctagctttgtttaactttaagaaggagatacatctagaccggaatattaatagatcatggagataattaaaatgataaccatctcgcaaataaataagtattttactgttttcgtaacagttttgtaataaaaaaacctataaatattccggattattcataccgtcccaccatcgggcgcggatccgccaccatgctgcgtctgctgctgcgtcaccacttccactgcctgctgctgtgcgctgtgtgggctaccccctgcctggcttccccttggtccaccctgaccgctaaccagaacccctccccaccctggtccaagctgacctactccaagccccacgacgctgctaccttctactgccccttcctgtacccatccccccctcgttccccactgcagttctccggtttccagcgtgtgctgaccggtcccgagtgccgtaacgagactctgtacctgctgtacaaccgcgagggccagaccctggtcgagaggtcctccacctgggtcaagaaggtcatctggtacttgtccggtcgtaaccagaccatcctgcagcgtatgccccgtaccgcttccaagccctccgacggcaacgtgcagatctccgtcgaggacgctaagatcttcggtgctcacatggtgcccaagcagaccaagctgctgcgtttcgtggtcaacgacggcacccgttaccagatgtgcgtgatgaagctcgagtcctgggctcacgtgttccgtgactactccgtgtccttccaagtgcgcctgaccttcaccgaggctaacaaccagacctacaccttctgcacccaccccaacctgatcgtgtaaaagcttgtcgagaagtactagaggatcataatcagccataccacatttgtagaggttttacttgctttaaaaaacctcccacacctccccctgaacctgaaacataaaatgaatgcaattgttgttgttaacttgtttattgcagcttataatggttacaaataaagcaatagcatcacaaatttcacaaataaagcatttttttcactgcattctagttgtggtttgtccaaactcatcaatgtatcttatcatgtctggatctgatcactgcttgagcctagaagatccggctgctaacaaagcccgaaaggaagctgagttggctgctgggtgcctaatgagtgagctaactcacattaattgcccggaatattaatagatcatggagataattaaaatgataaccatctcgcaaataaataagtattttactgttttcgtaacagttttgtaataaaaaaacctataaatattccggattattcataccgtcccaccatcgggcgcggatccgccaccatgcgtctgtgccgtgtgtggctgtccgtgtgcctgtgcgctgtggtgctgggccagtgccagcgtgaaaccgctgagaagaacgactactaccgtgtgccccactactgggacgcttgctcccgtgctctgcccgaccagacccgttacaagtacgtcgagcagctggtggacctgaccctgaactaccactacgacgcttcccacggcctggacaacttcgacgtgctgaagcgtatcaacgtgaccgaggtgtccctgctgatctccgacttccgtcgtcagaaccgtcgtggtggcaccaacaagcgtaccaccttcaacgctgctggttccctggctccccacgctcgttccctcgagttctccgtgcgtctgttcgctaactaaaagcttgtcgagaagtactagaggatcataatcagccataccacatttgtagaggttttacttgctttaaaaaacctcccacacctccccctgaacctgaaacataaaatgaatgcaattgttgttgttaacttgtttattgcagcttataatggttacaaataaagcaatagcatcacaaatttcacaaataaagcatttttttcactgcattctagttgtggtttgtccaaactcatcaatgtatcttatcatgtctggatctgatcactgcttgagcctagaagatccggctgctaacaaagcccgaaaggaagctgagttggctgctgccaccgctgagcaataactatcataacccccggaatattaatagatcatggagataattaaaatgataaccatctcgcaaataaataagtattttactgttttcgtaacagttttgtaataaaaaaacctataaatattccggattattcataccgtcccaccatcgggcgcggatcccggtccgaagcgcgcggaattcaaaggcctaccgtcgacgccaccatggaatcccgtatctggtgcctggtcgtgtgcgtgaacctgtgcatcgtgtgcctgggtgctgctgtgtcctcctcctccacccgtggcacctccgctacccactcccaccactcctcccacaccacctccgccgctcactcccgttccggttccgtgtcccagcgtgtgacctcctcccagaccgtgtcccacggtgtcaacgagactatctacaacaccaccctgaagtacggcgacgtcgtgggtgtcaacaccaccaagtacccctaccgtgtgtgctccatggctcagggcaccgacctgatccgtttcgagcgtaacatcgtgtgcacctccatgaagcccatcaacgaggacctggacgagggtatcatggtggtgtacaagcgcaacatcgtggctcacaccttcaaggtccgcgtgtaccagaaggtgctgaccttccgtcgttcctacgcttacatccacaccacttacctgctgggttccaacaccgagtacgtggcccctcccatgtgggagatccaccacatcaactcccactcccagtgctactcctcttactcccgtgtgatcgctggcaccgtgttcgtggcttaccaccgtgactcctacgagaacaagaccatgcagctgatgcccgacgactactccaacacccactccacccgttacgtgaccgtgaaggaccagtggcactcccgtggttccacctggctgtaccgtgaaacctgcaacctgaactgcatggtcaccatcaccaccgctcgttccaagtacccttaccacttcttcgctacctccaccggcgacgtggtggacatctcccccttctacaacggtactaaccgtaacgcttcctacttcggcgagaacgctgacaagttcttcatcttccccaactacaccatcgtgtccgacttcggtcgtcccaactccgctctggaaacccaccgtctggtggctttcttggagcgtgctgactccgtgatctcctgggacatccaggacgagaagaacgtgacctgccagctgaccttctgggaggcttccgagcgtaccatccgttccgaggctgaggactcctaccacttctccagcgctaagatgaccgctaccttcctgtccaagaaacaagaggtcaacatgtccgactccgccctggactgcgtgcgtgacgaggctatcaacaagctgcagcagatcttcaacacctcctacaaccagacctacgagaagtacggaaacgtgtccgtgttcgagactaccggtggcctggtggtgttctggcagggtatcaagcagaagtccctggtcgagctggaacgtctggctaaccgttcctccctgaacctgacccacaaccgtaccaagcgttccaccgacggcaacaacgctactcacctgtccaacatggaatccgtgcacaacctggtgtacgctcagctgcagttcacctacgacaccctgcgcggttacatcaaccgtgctctggctcagatcgctgaggcttggtgcgtggaccagcgtcgtaccctggaagtgttcaaggaactgtccaagatcaacccctccgctatcctgtccgccatctacaacaagcctatcgctgctcgtttcatgggcgacgtgctgggcctggcttcctgcgtgaccatcaaccagacttccgtgaaggtgctgcgtgacatgaacgtgaaggaatcccccggtcgttgctactcccgtcccgtggtcatcttcaacttcgctaactcctcctacgtgcagtacggccagctgggcgaggacaacgagatcctgctgggcaaccaccgtaccgaggaatgccagctgccctccctgaagatcttcatcgctggcaactccgcttacgaatacgtggactacctgttcaagcgcatgatcgacctgtcctccatctctaccgtggactccatgatcgctctggacatcgaccccctggaaaacaccgacttccgtgtgctggaactgtactcccagaaggaactgcgttccatcaacgtgttcgacctggaagagatcatgcgcgagttcaactcctacaagcagcgtgttaagtacgtcgaggacaaggtggtggaccccctgcccccctacctgaagggactggacgacctgatgtccggcctgggagctgccggcaaggctgtgggtgtcgctatcggtgctgtgggtggtgctgtggcttccgtggtcgagggtgtcgccaccttcctgaagaaccccttcggtgctttcaccatcatcctggtggctatcgctgtggtcatcatcatctacctgatctacacccgtcagcgtcgtctgtgcatgcagcccctgcagaacctgttcccctacctggtgtccgctgacggtactaccgtgacctccggcaacaccaaggacacctccctgcaggctcccccatcctacgaggaatccgtctacaactccggtcgcaagggtcccggtcccccttcctccgacgcttctaccgctgctcccccatacaccaacgagcaggcttaccagatgctgctggctctcgtgcgtctggacgctgagcagcgtgcacagcagaacggcaccgactccctggacggccagaccggaacccaggacaagggccagaagcccaacctgctggaccgtctgcgtcaccgcaagaacggttaccgtcacctgaaggactccgacgaggaagagaacgtctaaggcgcgccaagcttgtcgagaagtactagagatcataatcagccataccacatttgtagaggttttacttgctttaaaaaacctcccacacctccccctgaacctgaaacataaaatgaatgcaattgttgttgttaacttgtttattgcagcttataatggttacaaataaagcaatagcatcacaaatttcacaaataaagcatttttttcactgcattctagttgtggtttgtccaaactcatcaatgtatcttatcatgtctggatctgatcactgcttgagcctagaagatccggctgctaacaaagcccgaaaggaagctgggaatattaatagatcatggagataattaaaatgataaccatctcgcaaataaataagtattttactgttttcgtaacagttttgtaataaaaaaacctataaatattccggattattcataccgtcccaccatcgggcgcggatccgccaccatgcgtcccggcctgccctcctacctgatcgtgctggctgtgtgcctgctgtcccacctcctgtcctcccgttacggtgctgaggctatctccgagcccctggacaaggctttccacctcctgctgaacacctacggtcgtcctatccgtttcctgcgcgagaacaccacccagtgcacctacaactcctccctgcgcaactccaccgtcgtccgcgagaacgctatctccttcaacttcttccagtcctacaaccagtactacgtgttccacatgccccgttgcctgttcgctggtcccctggctgagcagttcctgaaccaggtggacctgaccgagactctcgagcgttaccagcagcgtctgaacacttacgctctggtgtccaaggacctggcttcctaccgttccttcagccagcagctgaaggctcaggactccctgggcgagcagcccaccactgtgcctccccctatcgacctgtccatcccccacgtgtggatgcccccccagaccactcctcacggctggaccgagtcccacaccacctccggactgcaccgtccccacttcaaccagacctgcatcctgttcgacggtcacgacctgctgttctccaccgtgaccccctgcctgcaccagggcttctacctcatcgacgagctgcgttacgtgaagatcaccctgaccgaggatttcttcgtggtcaccgtgtccatcgacgacgacacccccatgctgctgatcttcggtcacctcccccgtgtgctgttcaaggctccctaccagcgtgacaacttcatcctgcgtcagaccgagaagcacgagctgctggtgctggtcaagaaggaccagctgaaccgtcactcttacctgaaggaccccgacttcctggacgctgctctggacttcaactacctggacctgtccgctctgctgaggaactccttccaccgttacgctgtggacgtgctgaagtccggtcgttgccagatgctggaccgtcgtaccgtcgagatggctttcgcttacgccctggctctgttcgctgctgctcgtcaagaagaggctggcgctcaggtgtccgtgccccgtgctctggaccgtcaggctgctctgctgcagatccaagagttcatgatcacttgcctgtcccagaccccccctcgtaccaccctgctgctgtaccccaccgctgtggacctggctaagcgtgctctgtggacccccaaccagatcaccgacatcacctccctcgtgcgtctggtgtacatcctgtccaagcagaaccagcagcacctgatcccccagtgggctctgcgtcagatcgctgacttcgctctgaagctgcacaagacccacctggcttcattcctcagcgctttcgctcgccaagagctgtacctgatgggttccctggtgcactccatgctggtgcacaccaccgagcgtcgcgagatcttcatcgtggaaaccggcctgtgctccctggccgagctgtcccacttcacccagctgctggctcacccccaccacgagtacctgtccgacctgtacaccccctgctcctcttccggtcgtcgtgaccactccctggaacgtctgacccgtctgttccccgacgctaccgtgcctaccaccgtgcctgctgctctgtccatcctgtctaccatgcagccctccaccctggaaaccttccccgacctgttctgcctgcctctgggcgagtccttctccgctctgaccgtgtccgagcacgtgtcctacgtggtcaccaaccagtacctgatcaagggcatctcctaccccgtgtccaccaccgtcgtgggccagtccctgatcatcacccagaccgactcccagaccaagtgcgagctgacccgtaacatgcacaccactcactccatcaccgctgctctgaacatctccctcgagaactgcgctttctgccagtccgctctgttggagtacgacgacactcagggtgtcatcaacatcatgtacatgcacgactccgacgacgtgctgttcgctctggacccctacaacgaggtggtggtgtcctccccccgtacccactacctgatgctgctgaagaacggcaccgtgctggaagtgaccgacgtggtggtggacgctaccgaccgtctgctgatgatgtccgtgtacgctctgtccgctatcatcggcatctacctgctgtaccgtatgctgaagacctgctaaggcgccaagctttgtcgagaagtactagaggatcataatcagccataccacatttgtagaggttttacttgctttaaaaaacctcccacacctccccctgaacctgaaacataaaatgaatgcaattgttgttgttaacttgtttattgcagcttataatggttacaaataaagcaatagcatcacaaatttcacaaataaagcatttttttcactgcattctagttgtggtttgtccaaactcatcaatgtatcttatcatgtctggatctgatcactgcttgagcctagaagatccggctgctaacaaagcccgaaaggaagctgagttggctgctgccaccgctgagcaataactatcataacccctaggagatccgaaccagataagtgaaatctagttccaaactattttgtcatttttaattttcgtattagcttacgacgctacacccagttcccatctattttgtcactcttccctaaataatccttaaaaactccatttccacccctcccagttcccaactattttgtccgcccaca

SEQ ID NO: 46 - DNA, 29499 bp, Artificial Sequence
  Synthetic construct
ttgttccagtttggaacaagagtccactattaaagaacgtggactccaacgtcaaagggcgaaaaaccgtctatcagggcgatggcccactacgtgaaccatcaccctaatcaagttttttggggtcgaggtgccgtaaagcactaaatcggaaccctaaagggagcccccgatttagagcttgacggggaaagccggcgaacgtggcgagaaaggaagggaagaaagcgaaaggagcgggcgctagggcgctggcaagtgtagcggtcacgctgcgcgtaaccaccacacccgccgcgcttaatgcgccgctacagggcgcgtccattcgccattcaggctgcgcaactgttgggaagggcgatcggtgcgggcctcttcgctattacgccagctggcgaaagggggatgtgctgcaaggcgattaagttgggtaacgccagggttttcccagtcacgacgttgtaaaacgacggccagtgcatagaccagccgcgtaacctggcaaaatcggttacggttgagtaataaatggatgccctgcgtaagcgggtgtgggcggacaataaagtcttaaactgaacaaaatagatctaaactatgacaataaagtcttaaactagacagaatagttgtaaactgaaatcagtccagttatgctgtgaaaaagcatactggacttttgttatggctaaagcaaactcttcattttctgaagtgcaaattgcccgtcgtattaaagaggggcgtggccaagggcatggtaaagactatattcgcggcgttgtgacaatttaccgaacaactccgcggccgggaagccgatctcggcttgaacgaattgttaggtggcggtacttgggtcgatatcaaagtgcatcacttcttcccgtatgcccaactttgtatagagagccactgcgggatcgtcaccgtaatctgcttgcacgtagatcacataagcaccaagcgcgttggcctcatgcttgaggagattgatgagcgcggtggcaatgccctgcctccggtgctcgccggagactgcgagatcatagatatagatctcactacgcggctgctcaaacttgggcagaacgtaagccgcgagagcgccaacaaccgcttcttggtcgaaggcagcaagcgcgatgaatgtcttactacggagcaagttcccgaggtaatcggagtccggctgatgttgggagtaggtggctacgtctccgaactcacgaccgaaaagatcaagagcagcccgcatggatttgacttggtcagggccgagcctacatgtgcgaatgatgcccatacttgagccacctaactttgttttagggcgactgccctgctgcgtaacatcgttgctgctgcgtaacatcgttgctgctccataacatcaaacatcgacccacggcgtaacgcgcttgctgcttggatgcccgaggcatagactgtacaaaaaaacagtcataacaagccatgaaaaccgccactgcgccgttaccaccgctgcgttcggtcaaggttctggaccagttgcgtgagcgcatacgctacttgcattacagtttacgaaccgaacaggcttatgtcaactgggtttgtgccttcatccgtttccacggtgtgcgtcacccggcaaccttgggcagcagcgaagtcgaggcatttctgtcctggctggcgaacgagcgcaaggtttcggtctccacgcatcgtcaggcattggcggccttgctgttcttctacggcaaggtgctgtgcacggatctgcccttgcttcaggagatcggtagacctcggccgtcgcggcgcttgccggtggtgctgaccccggatgaagtggttcgcatcctcggttttctggaaggcgagcatcgtttgttcgcccaggactctagctatagttctagtggttggctacagctttgtttgtactatcaacaggttgaactgctgatcaacagatcctctacgcggccgcggtaccataacttcgtatagcatacattatacgaagttatctggtttaaacgtacccgtagtggctatggcagggcttgccgccccgacgttggctgcgagccctgggccttcacccgaacttgggggttggggtggggaaaaggaagaaacgcgggcgtattggtcccaatggggtctcggtggggtatcgacagagtgccagccctgggaccgaaccccgcgtttatgaacaaacgacccaacacccgtgcgttttattctgtctttttattgccgtcatagcgcgggttccttccggtattgtctccttccgtgtttcagttagcctcccccatctcccggtaccgcatgctatgcatcagctgctagcaccatggctcgagatcccgggtgatcaagtcttcgtcgagtgattgtaaataaaatgtaatttacagtatagtattttaattaatatacaaatgatttgataataattcttatttaactataatatattgtgttgggttgaattaaaggtccgtatactagtatcgattcgcgacctactccggaatattaatagatcatggagataattaaaatgataaccatctcgcaaataaataagtattttactgttttcgtaacagttttgtaataaaaaaacctataaatattccggattattcataccgtcccaccatcgggcgcggatccgccaccatggaaaactggtccgctctggaactgctgcccaaggtcggaatccctaccgacttcctgacccacgtcaagacctccgctggcgaggaaatgttcgaggctctgaggatctactacggcgacgaccccgagcgttacaacatccacttcgaggctatcttcggcaccttctgcaaccgtctggaatgggtgtacttcctgacttccggcctggctgctgctgctcacgctatcaagttccacgacctgaacaagctgaccaccggcaagatgctgttccacgtgcaagtgccccgtgtggcttccggtgctggcctgcctacctcccgtcagaccaccatcatggtcaccaagtactccgagaagtcccccatcaccatccctttcgagctgtccgctgcttgcctgacttacctgcgtgaaaccttcgagggcaccatcctggacaagatcctgaacgtcgaggctatgcacaccgtgctgcgtgctctgaagaacaccgctgacgctatggaacgtggcctgatccacagcttcctccagaccctgctgaggaaggctcccccctacttcgtggtgcagaccctggtcgagaacgctaccctggctcgtcaggctctgaaccgtatccagcgctccaacatcctgcagtccttcaaggctaagatgctggctaccctgttcctgctgaaccgtacccgtgaccgtgactacgtgctgaagttcctgacccgtctggctgaggctgctaccgactccatcctcgacaaccctactacctacaccacctcctccggtgctaagatctccggtgtcatggtgtccaccgctaacgtgatgcagatcatcatgtccctgctgtcctcccacatcactaaggaaaccgtgtccgctcccgctacctacggcaacttcgtgctgtcccccgagaacgctgtgaccgctatctcctaccactctatcctggctgacttcaactcctacaaggctcacctgacctccggccagccccacctccccaacgactccctgagccaggctggtgctcactccctgacccccctgtccatggacgtgatccgtctgggcgaaaagaccgtgatcatggaaaacctgcgtcgcgtgtacaagaacaccgacaccaaggaccccctggaacgtaacgtggacctgaccttcttcttccccgtgggcctgtacctgcccgaggaccgtggttacaccaccgtcgagtccaaggtcaagctgaacgacaccgtgcgtaacgctctgcccaccaccgcttacctgctgaacagggaccgtgctgtgcaaaagatcgacttcgtggacgctctcaagaccctgtgccaccccgtgctgcacgagcctgctccatgcctgcaggctttcaccgagcgtggtcccccatccgagcccgctatgcagcgtctgctggaatgccgtttccagcaagagcccatgggtggtgctgctcgtcgtatcccccacttctaccgtgtgcgccgcgaggtgccccgtaccgtgaacgagatgaagcaggacttcgtggtcaccgacttctacaaggttggaaacatcaccctgtacaccgagctgcaccctttcttcgacttcacccactgccaagagaactccgagactgtggctctgtgcaccccccgtatcgtgatcggcaacctgcccgacggcctggctcccggtcccttccacgagctgaggacctgggagatcatggaacacatgcgcctgcgtcccccacccgactacgaggaaaccctgcgtctgttcaagaccaccgtgacctcccccaactaccccgagctgtgctacctggtggacgtgctggtgcacggcaacgctgacgctttcctgctgatccgcgctttcatcgctcgttgcatcgtgaacatgttccacacccgtcagctgctggtgttcgctcactcctacgctctggtcaccctgatcgctgagcacctggctgacggtgctctgcccccccagctcctgttccactaccgtaacctggtggctgtgctgcgcctggtcacccgtatctccgctctgcccggcctgaacaacggccagctggctgaggaacccctgtccgcttacgtgaacgctctgcacgaccacaggctgtggccccccttcgtgacccacctccctcgtaacatggaaggtgtccaggtggtggctgatcgtcagcccctgaaccccgctaacatcgaggctcgtcaccacggtgtctccgacgtgccccgtctgggtgctatggacgctgacgagcccctgttcgtggacgactaccgtgctaccgacgacgagtggaccctgcaaaaggtgttctacctgtgcctgatccccgctatgaccaacaaccgtgcttgcggcctgggcctgaacctcaagactctgctggtggacctgttctaccgtcccgccttcctgctcatgcccgctgctaccgctgtgtccacctccggcaccacctccaaggaatccacctctggtgtcacccccgaggactccgtggctgctcagcgtcaggctgtgggcgagatgctgaccgagctggtcgaggacgtggccaccgacgctcacacccctctgctgcaggcttgccgcgagctgttcctggctgtgcagttcgtgggcgagcacgtgaaggtgctggaagtgcgtgctcccctggaccacgctcagaggcagggactgcccgacttcatctcccgtcagcatgtgctgtacaacggttgctgcgtcgtgaccgctcctaagaccctgatcgagtactccctgcccgtgcccttccaccgtttctactccaaccccaccatctgcgctgctctgtccgacgacatcaagcgttacgtgaccgagttcccccactaccatagacacgatggtggtttccccctgcccaccgctttcgctcacgagtaccacaactggctgcgtagccccttctcccgttactccgctacctgccccaacgtgctgcactccgtgatgaccctggctgctatgctgtacaagatctcccccgtgtccctggtgctgcagaccaaggctcacatccaccccggtttcgctctgaccgctgtgcgtaccgacaccttcgaggtggacatgctgctgtactccggcaagtcctgcacctccgtcatcatcaacaaccccatcgtgaccaaggaagagagggacatctccaccacctaccacgtgacccagaacatcaacaccgtggacatgggcctgggttacacctccaacacttgcgtggcctacgtgaaccgcgtccgcaccgacatgggtgtccgtgtgcaggacctgttccgtgtgttccccatgaacgtgtaccgccacgatgaggtggaccgttggatcaggcacgctgctggcgtcgagcgtccccagctgctggacaccgagactatctccatgctgaccttcggttccatgtccgagcgcaacgctgctgctaccgtgcacggccagaaggctgtctgcgagctgatcctgacccctgtgactatggacgtgaactacttcaagatcaccaacaaccctcgtggtcgtgcttcctgcatgctgggcgtggacccctacgacaccgaggctgccaccaaggctatctacgaccaccgcgaggctgacgctcagaccttcgctgctacccacaacccatgggcttcccaggctggttgcctgtccgacgtcctgtacaacacccgtcaccgcgagcgtctgggctacaactccaagttctactccccctgcgctcagtacttcaacaccgaggaaatcatcgctgccaacaagaccctcttcaagaccatcgacgagtacctgctgcgcgctaaggactgcatccgtggcgacaccgacactcagtacgtgtgcgtcgagggaaccgagcagctgatcgagaacccttgccgtctgacccaagaggctctgcccatcctgtccaccaccaccctggctctgatggaaactaagctgaagggtggcgctggtgctttcgctacctccgagactcacttcggcaactacgtcgtgggagagatcatccccctgcagcagtccatgctgttcaacagctaagagctcaagcttgtcgagaagtactagaggatcataatcagccataccacatttgtagaggttttacttgctttaaaaaacctcccacacctccccctgaacctgaaacataaaatgaatgcaattgttgttgttaacttgtttattgcagcttataatggttacaaataaagcaatagcatcacaaatttcacaaataaagcatttttttcactgcattctagttgtggtttgtccaaactcatcaatgtatcttatcatgtctggatctgatcactgcttgagcctagaagatccggctgctaacaaagcccgaaaggaagctgagttggctgctgcccaccgctgagcaataactatcataacccccggaatattaatagatcatggagataattaaaatgataaccatctcgcaaataaataagtattttactgttttcgtaacagttttgtaataaaaaaacctataaatattccggattattcataccgtcccaccatcgggcgcggatccgccaccatggctgctatggaagctaacatcttctgcaccttcgaccacaagctgtctatcgctgacgtgggcaagctgaccaagctggtggctgctgtggtgcccatcccccagcgtctgcacctgatcaagcactaccagctgggcctgcaccagttcgtggaccacacccgtggttacgtgcgtctgcgtggcctgctgcgtaacatgaccctgaccctgatgcgtcgtgtcgagggcaaccagatcctgctgcacgtgcccacccacggcctgctgtacaccgtgctgaacaccggtcccgtgacctgggagaagggcgacgctctgtgcgtgctgccccccctgttccacggtcccctggctcgtgaaaacctgttgaccctgggccagtgggagctggtgctgccctggatcgtgcccatgcccctggctctggaaatcaaccagcgcctgctgatcatgggcctgttctccctggaccgttcctacgaagaagtgaaggctgctgtccagcagctgcagaccatcaccttccgtgacgctaccttcaccatccccgaccccgtgatcgaccagcacctcctgatcgacatgaagaccgcttgcctgtccatgtccatggtggctaacctggcttccgagctgaccatgacctacgtccgcaagctggctttggaggactcttccatgctgctggtcaagtgccaagagctgctgatgcgtctggaccgcgagcgttccgtgggcgagcctcgtactcccgctcgtcctcagcacgtgtcccccgacgacgagatcgctcgtctgtccgctctgttcgtgatgctgcgtcagctggacgacctgatccgcgagcaggtcgtgttcaccgtgtgcgacgtgagcccagacaacaagtccgctacctgcatcttcaagggctaaggcgcgccaagcttgtcgagaagtactagaggatcataatcagccataccacatttgtagaggttttacttgctttaaaaaacctcccacacctccccctgaacctgaaacataaaatgaatgcaattgttgttgttaacttgtttattgcagcttataatggttacaaataaagcaatagcatcacaaatttcacaaataaagcatttttttcactgcattctagttgtggtttgtccaaactcatcaatgtatcttatcatgtctggatctgatcactgcttgagcctagaagatccggctgctaacaaagcccgaaaggaagctgagttggctgctgccaccgctgagcaataactatcataacccccggaatattaatagatcatggagataattaaaatgataaccatctcgcaaataaataagtattttactgttttcgtaacagttttgtaataaaaaaacctataaatattccggattattcataccgtcccaccatcgggcgcggatcccggtccgaagcgcgcggaattcaaaggcctgccaccatggaaatgaacaaggtgctgcatcaggatctggtgcaggctacccgtcgtatcctgaagctgggcccctccgagctgcgtgtgaccgacgctggcctgatctgcaagaaccccaactactccgtgtgcgacgctatgctcaagaccgacaccgtgtactgcgtcgagtacctgctgtcctactgggagtcccgtaccgaccacgtgccctgcttcatcttcaagaacaccggttgcgctgtgtccctgtgctgcttcgtgcgtgctcccgtgaagctggtgtcccctgctcgtcacgtgggcgagttcaacgtgctgaaggtcaacgagtccctgatcgtgaccctgaaggacatcgaggaaatcaagccctccgcttacggtgtcctgactaagtgcgtcgtccgcaagtccaactccgcttccgtgttcaacatcgagctgatcgctttcggtcccgagaacgagggcgagtacgagaacctgctgcgcgagctgtacgctaagaaggctgcttccacctccctggctgtgcgtaaccacgtgaccgtgtcctcccactccggttccggtccctccctgtggcgtgctcgtatgtccgctgctctgacccgtaccgctggcaagcgctcctccaggactgctagccctccaccaccacctcctcgtcaccctagctgctctcccactatggtggctgctggtggagctgctgctggtcctagacctccccctcctcctatggctgctggatcctggcgtctgtgccgttgcgaggcttgcatgggccgttgcggttgcgcttccgagggcgacgctgacgaggaagaggaagagttgctggctctggctggcgagggcaaggctgctgctgccgctgccggtcaagacgtcggtggttccgctcgtcgtcccctcgaggaacacgtgtcccgtcgtcgtggtgtctccacccaccaccgtcaccccccttccccaccttgcgctccctccctggaacgtaccggttaccgttgggctccttcctcctggtggcgcgctcgttctggtccttcccgtccccagtccggtccctggctgcctgctcgtttcgctaccctgggtcccctggtcctggctctgctgttggtgctggccctgctgtggcgtggtcacggtcaatcccccagccccacccgttccgctcaccgtgactaaaagcttgtcgagaagtactagaggatcataatcagccataccacatttgtagaggttttacttgctttaaaaaacctcccacacctccccctgaacctgaaacataaaatgaatgcaattgttgttgttaacttgtttattgcagcttataatggttacaaataaagcaatagcatcacaaatttcacaaataaagcatttttttcactgcattctagttgtggtttgtccaaactcatcaatgtatcttatcatgtctggatctgatcactgcttgagcctagaagatccggctgctaacaaagcccgaaaggaagctgagttggctgctgtggctagctttgtttaactttaagaaggagatacatctagaaatattaatagatcatggagataattaaaatgataaccatctcgcaaataaataagtattttactgttttcgtaacagttttgtaataaaaaaacctataaatattccggattattcataccgtcccaccatcgggcgcggatcccggtccgaagcgcgcggaattcaaaggcctacgtcgacgccaccatgtccaacaccgctcccggtcccaccgtggctaacaagcgtgacgagaagcaccgtcacgtggtcaacgtggtgctcgagctgcccaccgagatctccgaggctacccaccccgtgctggctaccatgctgtccaagtacacccgtatgtcctccctgttcaacgacaagtgcgctttcaagctggacctgctgcgtatggtggctgtgtcccgtacccgtcgctaaaagcttgtcgagaagtactagaggatcataatcagccataccacatttgtagaggttttacttgctttaaaaaacctcccacacctccccctgaacctgaaacataaaatgaatgcaattgttgttgttaacttgtttattgcagcttataatggttacaaataaagcaatagcatcacaaatttcacaaataaagcatttttttcactgcattctagttgtggtttgtccaaactcatcaatgtatcttatcatgtctggatctgatcactgcttgagcctagaagatccggctgctaacaaagcccgaaaggaagctgagttggctgctgggtgcctaatgagtgagctaactcacattaattgcccggaatattaatagatcatggagataattaaaatgataaccatctcgcaaataaataagtattttactgttttcgtaacagttttgtaataaaaaaacctataaatattccggattattcataccgtcccaccatcgggcgcggatcccggtccgaagcgcgcggaattcgccaccatggacgctcgtgctgtggctaagcgtccccgtgaccccgctgacgaggacaacgagctggtcaccgctctgaaggctaagcgtgaagtgaacaccatctccgtgcgttacctgtaccacgctgaccaccaggctctgaccgctcgtttcttcgtgcccgagggcctggtcgagttcgaggctcagcccggtgctctgctgatccgtatggaaaccggttgcgactccccccgtcacctgtacatctccctgtacctgctgggtatccgtgcttccaacgtgtccgcttccacccgttgcctgctcgagtccgtgtacaccgcttccgctgctcgtgctgctctgcagtggctggacctgggtccccacctcctgcaccgtcgtctggaaaccctgggttgcgtcaagaccgtgtccctgggtatcacctccctgctgacctgcgtgatgcgcggctacctgtacaacaccctcaagaccgaggtgttcgctctgatgatccccaaggacatgtacctgacctgggaggaaacccgcggtcgtctgcagtacgtgtacctgatcatcgtgtacgactacgacggtcccgagactcgtcccggtatctacgtgctgacctcctctatcgctcactggcagaccctggtggacgtggcccgtggaaagttcgctcgtgaacgctgctccttcgtgaaccgtcgtatcacccgtccccgtcagatccccctgtgcaccggtgtcatccaaaagctgggctggtgcctggctgacgacatccacacctcattcctcgtgcacaaggaactgaagctgtccgtcgtgcgtctggacaacttctccgtcgagctgggcgacttccgcgagttcgtgcagctgttgaattttgaccttcttaagcttgcgggagacgtcgagtccaaccctgggcccatggaatcccgtggtcgtcgttgccccgagatgatctccgtgctgggtcccatctccggtcacgtcctgaaggctgtgttctcccgtggcgacacccccgtgctgccccacgaaactcgtctgctgcagaccggtatccacgtgcgtgtgtcccagccctccctgatcctggtgtcccagtacacccccgactccaccccttgccaccgcggagacaaccagctgcaggtccagcacacctacttcaccggttccgaggtcgagaacgtgtccgtgaacgtgcacaaccccaccggtcgttccatctgcccctcccaagagcccatgtccatctacgtgtacgctctgcccctgaagatgctgaacatcccctccatcaacgtgcaccactacccctccgctgctgagcgcaagcaccgtcacctccccgtggctgacgctgtgatccacgcttccggcaagcagatgtggcaggctcgtctgaccgtgtccggcctggcttggacccgtcagcagaaccagtggaaggaacccgacgtgtactacacctccgctttcgtgttccccaccaaggacgtggccctgcgtcacgtcgtgtgcgctcacgaactcgtgtgctccatggaaaacacccgtgctaccaagatgcaagtgatcggcgaccagtacgtgaaggtgtacctggaatccttctgcgaggacgtgccctccggcaagctgttcatgcacgtgaccctgggttccgacgtggaagaggacctgaccatgacccgtaacccccagcccttcatgcgtccccacgagcgtaacggtttcaccgtgctgtgccccaagaacatgatcatcaagcccggcaagatctcccacatcatgctggacgtggccttcacctcccacgagcacttcggcctgctgtgccctaagtccatccccggcctgtccatctccggcaacctgctgatgaacggccagcagatcttcctggaagtgcaggctatccgtgaaaccgtcgagctgcgtcagtacgaccctgtggctgctctgttcttcttcgacatcgacctgctgctgcagcgtggtccccagtactccgagcaccccaccttcaccagccagtaccgtatccagggcaagctggaataccgtcacacctgggaccgtcacgacgagggtgctgctcagggcgacgacgacgtgtggacctccggttccgactccgacgaggaactggtcaccaccgagcgcaagaccccccgtgtgaccggtggtggtgctatggctggtgcttccacctccgctggtcgcaagcgcaagtccgcttcctccgctaccgcttgcaccgctggtgtcatgacccgtggtcgcctgaaggctgagtccaccgtggctcccgaagaggacactgacgaggactccgacaacgagatccacaaccccgctgtgttcacctggcccccctggcaggctggtatcctggctcgtaacctggtgcccatggtggctaccgtgcagggccagaacctgaagtaccaagagttcttctgggacgccaacgacatctaccgtatcttcgctgagctggaaggcgtgtggcagcccgctgctcagcccaagcgtcgtcgtcaccgtcaggacgctctgcctggtccctgtatcgcttccacccccaagaagcaccgcggctaaaagcttgtcgagaagtactagaggatcataatcagccataccacatttgtagaggttttacttgctttaaaaaacctcccacacctccccctgaacctgaaacataaaatgaatgcaattgttgttgttaacttgtttattgcagcttataatggttacaaataaagcaatagcatcacaaatttcacaaataaagcatttttttcactgcattctagttgtggtttgtccaaactcatcaatgtatcttatcatgtctggatctgatcactgcttgagcctagaagatccggctgctaacaaagcccgaaaggaagctgagttggctgctgtggctagctttgtttaactttaagaaggagatacatctagacctgcaggccggaatattaatagatcatggagataattaaaatgataaccatctcgcaaataaataagtattttactgttttcgtaacagttttgtaataaaaaaacctataaatattccggattattcataccgtcccaccatcgggcgcggatcccggtccgaagcgcgcggaattcgccaccatgaccatggacgagcagcagccccaggctgtgacccccgtgtacgtgggcggtttcctggctcgttacgaccagtcccccgacgaggctgagctgctgctgccacgtgacgtggtcgaacactggctgcacgctcagggccagggacagccttccctgtccgtggctctgcccctgaacatcaaccacgacgacaccgctgtcgtgggtcacgtggccgctatgcagtccgtgcgtgacggcctgttctgcctgggttgcgtgacctccccccgtttcctggaaatcgtgcgtcgtgcttccgagaagtccgagctggtgtcccgtggtcccgtgtccccactgcagcccgacaaggtggtcgagttcctgtccggttcctacgctggcctgtccctgtcatcccgtcgttgcgacgacgtcgaggctgctacctccctgagcggctccgagactacccccttcaagcacgtggccctgtgctccgtgggtcgtaggcgtggaaccctggctgtgtacggtcgtgaccccgagtgggtcacccagcgtttccccgacctgaccgctgctgaccgtgacggactgcgtgctcagtggcagcgttgcggttccaccgctgtggacgcttccggcgaccccttccgttccgactcctacggcctgctgggcaactccgtggacgctctgtacatccgcgagcgtctgcccaagctgcgttacgacaagcagctcgtgggtgtcaccgagcgcgagtcctacgtgaaggcttccgtgtcccccgaggctgcttgcgacatcaaggctgcttccgctgagcgttctggcgacagccgctcccaggctgctactcctgctgctggtgctcgtgtgccctccagctccccatccccacctgtcgagcctccctcccccgtgcaacctcctgctctgcctgcttccccctccgtgctgcctgctgagtccagcccctccctgtcaccctctgagcctgctgaggctgcctccatgtcccaccctctgagcgctgctgtgactgctgctaccgctccccctggtgctactgtggctggtgcttcccccgctgtgccttccctggcttggcctcacgacggtgtctacctgcccaaggacgctttcttctccctgctgggcgcttcccgttccgctgctcccgtgatgtaccccggtgctgtggctgctccccccagcgcttcacctgctcctctgcccctgccctcctaccccgcttcctacggtgctcccgtcgtgggttacgaccagctggctgctcgtcacttcgctgactacgtggacccccactaccccggctggggtcgtcgttacgagcccgctccttccctgcacccatcctaccctgtgccccctcctccatcacccgcttactaccgtcgtcgtgactcccccggtggcatggacgagcctccatctggatgggagcgttacgacggttcccaccgtggccagtcccaaaagcagcaccgtcacggtggttccggtggtcacaacaagcgtcgcaaggaagccgctgctgcatcctccagctccgacgaggacctgagcttccccggcgaggctgaacacggtcgtgctcgcaagcgtctgaagtcccacgtgaactccgacggaggtagcggaggccacgctggttccaaccagcagcagcaacagcgctacgacgagctgcgtgacgctatccacgagctgaagcgtgacctgttcgctgctcgccagtcctccaccctgctgtctgctgctctgccagctgccgcttcttcctcccctaccaccaccaccgtgtgcacccctactggcgagctgacctctggtggtggcgagactcccaccgctctgctgtccggtggtgctaaggtggccgagcgtgctcaggctggtgtcgtgaacgcttcctgccgtctggctaccgcttccggttccgaggctgccaccgctggtccctctaccgctggttcctcatcctgcccagcttccgtggtgctggctgccgctgctgctcaagccgccgctgcttcacagtcccccccaaaggatatggtggacctgaaccgtcgtatcttcgtggctgctctgaacaagctcgagtaataaaagcttgtcgagaagtactagaggatcataatcagccataccacatttgtagaggttttacttgctttaaaaaacctcccacacctccccctgaacctgaaacataaaatgaatgcaattgttgttgttaacttgtttattgcagcttataatggttacaaataaagcaatagcatcacaaatttcacaaataaagcatttttttcactgcattctagttgtggtttgtccaaactcatcaatgtatcttatcatgtctggatctgatcactgcttgagcctagaagatccggctgctaacaaagcccgaaaggaagctgagttggctgctgccaccgctgagcaataactatcataacccctaggggcctctaaacgggtcttgaggggttttttgctgaaaggaggaactatatccggatctgaacaggagggacagctgatagaaacagaagccactggagcacctcaaaaacaccatcatacactaaatcagtaagttggcagcatcacccgacgcactttgcgccgaataaatacctgtgacggaagatcacttcgcagaataaataaatcctggtgtccctgttgataccgggaagccctgggccaacttttggcgaaaatgagacgttgatcggcacgtaagaggttccaactttcaccataatgaaataagatcactaccgggcgtattttttgagttatcgagattttcaggagctaaggaagctaaaatggagaaaaaaatcactggatataccaccgttgatatatcccaatggcatcgtaaagaacattttgaggcatttcagtcagttgctcaatgtacctataaccagaccgttcagctggatattacggcctttttaaagaccgtaaagaaaaataagcacaagttttatccggcctttattcacattcttgcccgcctgatgaatgctcatccggaattccgtatggcaatgaaagacggtgagctggtgatatgggatagtgttcacccttgttacaccgttttccatgagcaaactgaaacgttttcatcgctctggagtgaataccacgacgatttccggcagtttctacacatatattcgcaagatgtggcgtgttacggtgaaaacctggcctatttccctaaagggtttattgagaatatgtttttcgtctcagccaatccctgggtgagtttcaccagttttgatttaaacgtggccaatatggacaacttcttcgcccccgttttcaccatgggcaaatattatacgcaaggcgacaaggtgctgatgccgctggcgattcaggttcatcatgccgtttgtgatggcttccatgtcggcagaatgcttaatgaattacaacagtactgcgatgagtggcagggcggggcgtaatttttttaaggcagttattggtgcccttaaacgcctggttgctacgcctgaataagtgataataagcggatgaatggcagaaattcgaaagcaaattcgacccggtcgtcggttcagggcagggtcgttaaatagccgcttatgtctattgctggtttaccggtttattgactaccggaagcagtgtgaccgtgtgcttctcaaatgcctgaggccagtttgctcaggctctccccgtggaggtaataattgacgatatgatcatttattctgcctcccagctgacattcatccggggtcagcaccgtttctgcggactggctttctacgtgttccgcttcctttagcagcccttgcgccctgagtgcttgcggcagcgtgaagctaattctgtcagccgttaagtgttcctgtgtcactcaaaattgctttgagaggctctaagggcttctcagtgcgttacatccctggcttgttgtccacaaccgttaaaccttaaaagctttaaaagccttatatattcttttttttcttataaaacttaaaaccttagaggctatttaagttgctgatttatattaattttattgttcaaacatgagagcttagtacgtgaaacatgagagcttagtacgttagccatgagagcttagtacgttagccatgagggtttagttcgttaaacatgagagcttagtacgttaaacatgagagcttagtacgtgaaacatgagagcttagtacgtactatcaacaggttgaactgctgatcaacagatcctctacgcggccgcggtaccataacttcgtatagcatacattatacgaagttatctggtttaaacgtacccgtagtggctatggcagggcttgccgccccgacgttggctgcgagccctgggccttcacccgaacttgggggttggggtggggaaaaggaagaaacgcgggcgtattggtcccaatggggtctcggtggggtatcgacagagtgccagccctgggaccgaaccccgcgtttatgaacaaacgacccaacacccgtgcgttttattctgtctttttattgccgtcatagcgcgggttccttccggtattgtctccttccgtgtttcagttagcctcccccatctcccggtaccgcatgctatgcatcagctgctagcttagcgagcgtccacagcctggggaccgtaacgggagtgagcgggcaggttcacacgggtctgcttcagctcagggggcaggccagcgtagtacttgtccaggtgacgcagcaggggggggtccagctggtgacgcaggcagaattccttcacagcgttgtacaggccgtagaacagggtgataccctcgggagcagcagcggtggacacgggcagacgcacagcacggttggtacgggtagcctcgttacggatagccaccaccacgttgaacagggaggggggcaccagctcgaaacccagcacgtgttcggtgaagatggaacgaccgtaggacagacgagtcaggtcgtaaccacggcacaggtcgtccacgcaagtgtacacagcgggggaaccgtcgccgcactcggagtaaccgcgcatcacggtcatccaacggggagcggtgtcggaggacagcagggtcagcagagcacgcagctggtcggggttgttgtacagcagggccagggtgtccaggaaagcgtcgtccagcagcacggagttagcagcctcgggggtcacgggacggtaacggatcagctgggacaggggaccgtccctacgggtcacgttgaccaggggacgcagccaggactcgtacttgtcgccctggaacacctctcccagcaggcaacgacgggtcagctcggggcactcagcgggcaccttctcagccacggtgggagccacggacacggtagcggaggacacgatgggcagcagcaggcagcaccacagcagagccacgggaccgggggagaaggagaaaccgcagtcgggacgacggcacatggtggctcgagatcccgggtgatcaagtcttcgtcgagtgattgtaaataaaatgtaatttacagtatagtattttaattaatatacaaatgatttgataataattcttatttaactataatatattgtgttgggttgaattaaaggtccgtatactagtatcgattcgcgacctactccggaatattaatagatcatggagataattaaaatgataaccatctcgcaaataaataagtattttactgttttcgtaacagttttgtaataaaaaaacctataaatattccggattattcataccgtcccaccatcgggcgcggatccgccaccatgaactccaaggacctgacccccttcctgaccaccctgtggctgctgctggaccactcccgtgtgcctcgtgtgcgtgctgaggaatgctgcgaagtgatcaacgtgaaccacccccccgagcgctgctacgacttcaagatgtgcaacctgttcaccgtggctctgcgttgccccgacggcgaagtgtgctactcccccgaaaagaccgctgagatccgtggtatcgtgaccaccatgacccactccctgacccgtcaagtgatccacaacaagctgaccagctgcaactacaaccccctgtacctcgaggctgacggtcgtatccgttgcggcaaggtgtccgacaaggctcagtacctgctgggtgctgctggttccgtgccctaccgttggatcaacctcgagtacgacaagatcacccgtatcgtgggcctggaccagtacctcgagtccgtgaagaagcacaagcgtctggacgtgtgccgtgctaagatgggttacatgctgcagtaaaagcttgtcgagaagtactagaggatcataatcagccataccacatttgtagaggttttacttgctttaaaaaacctcccacacctccccctgaacctgaaacataaaatgaatgcaattgttgttgttaacttgtttattgcagcttataatggttacaaataaagcaatagcatcacaaatttcacaaataaagcatttttttcactgcattctagttgtggtttgtccaaactcatcaatgtatcttatcatgtctggatctgatcactgcttgagcctagaagatccggctgctaacaaagcccgaaaggaagctgagttggctgctgtggctagctttgtttaactttaagaaggagatacatctagaccggaatattaatagatcatggagataattaaaatgataaccatctcgcaaataaataagtattttactgttttcgtaacagttttgtaataaaaaaacctataaatattccggattattcataccgtcccaccatcgggcgcggatccgccaccatgctgcgtctgctgctgcgtcaccacttccactgcctgctgctgtgcgctgtgtgggctaccccctgcctggcttccccttggtccaccctgaccgctaaccagaacccctccccaccctggtccaagctgacctactccaagccccacgacgctgctaccttctactgccccttcctgtacccatccccccctcgttccccactgcagttctccggtttccagcgtgtgctgaccggtcccgagtgccgtaacgagactctgtacctgctgtacaaccgcgagggccagaccctggtcgagaggtcctccacctgggtcaagaaggtcatctggtacttgtccggtcgtaaccagaccatcctgcagcgtatgccccgtaccgcttccaagccctccgacggcaacgtgcagatctccgtcgaggacgctaagatcttcggtgctcacatggtgcccaagcagaccaagctgctgcgtttcgtggtcaacgacggcacccgttaccagatgtgcgtgatgaagctcgagtcctgggctcacgtgttccgtgactactccgtgtccttccaagtgcgcctgaccttcaccgaggctaacaaccagacctacaccttctgcacccaccccaacctgatcgtgtaaaagcttgtcgagaagtactagaggatcataatcagccataccacatttgtagaggttttacttgctttaaaaaacctcccacacctccccctgaacctgaaacataaaatgaatgcaattgttgttgttaacttgtttattgcagcttataatggttacaaataaagcaatagcatcacaaatttcacaaataaagcatttttttcactgcattctagttgtggtttgtccaaactcatcaatgtatcttatcatgtctggatctgatcactgcttgagcctagaagatccggctgctaacaaagcccgaaaggaagctgagttggctgctgggtgcctaatgagtgagctaactcacattaattgcccggaatattaatagatcatggagataattaaaatgataaccatctcgcaaataaataagtattttactgttttcgtaacagttttgtaataaaaaaacctataaatattccggattattcataccgtcccaccatcgggcgcggatccgccaccatgcgtctgtgccgtgtgtggctgtccgtgtgcctgtgcgctgtggtgctgggccagtgccagcgtgaaaccgctgagaagaacgactactaccgtgtgccccactactgggacgcttgctcccgtgctctgcccgaccagacccgttacaagtacgtcgagcagctggtggacctgaccctgaactaccactacgacgcttcccacggcctggacaacttcgacgtgctgaagcgtatcaacgtgaccgaggtgtccctgctgatctccgacttccgtcgtcagaaccgtcgtggtggcaccaacaagcgtaccaccttcaacgctgctggttccctggctccccacgctcgttccctcgagttctccgtgcgtctgttcgctaactaaaagcttgtcgagaagtactagaggatcataatcagccataccacatttgtagaggttttacttgctttaaaaaacctcccacacctccccctgaacctgaaacataaaatgaatgcaattgttgttgttaacttgtttattgcagcttataatggttacaaataaagcaatagcatcacaaatttcacaaataaagcatttttttcactgcattctagttgtggtttgtccaaactcatcaatgtatcttatcatgtctggatctgatcactgcttgagcctagaagatccggctgctaacaaagcccgaaaggaagctgagttggctgctgccaccgctgagcaataactatcataacccccggaatattaatagatcatggagataattaaaatgataaccatctcgcaaataaataagtattttactgttttcgtaacagttttgtaataaaaaaacctataaatattccggattattcataccgtcccaccatcgggcgcggatcccggtccgaagcgcgcggaattcaaaggcctaccgtcgacgccaccatggaatcccgtatctggtgcctggtcgtgtgcgtgaacctgtgcatcgtgtgcctgggtgctgctgtgtcctcctcctccacccgtggcacctccgctacccactcccaccactcctcccacaccacctccgccgctcactcccgttccggttccgtgtcccagcgtgtgacctcctcccagaccgtgtcccacggtgtcaacgagactatctacaacaccaccctgaagtacggcgacgtcgtgggtgtcaacaccaccaagtacccctaccgtgtgtgctccatggctcagggcaccgacctgatccgtttcgagcgtaacatcgtgtgcacctccatgaagcccatcaacgaggacctggacgagggtatcatggtggtgtacaagcgcaacatcgtggctcacaccttcaaggtccgcgtgtaccagaaggtgctgaccttccgtcgttcctacgcttacatccacaccacttacctgctgggttccaacaccgagtacgtggcccctcccatgtgggagatccaccacatcaactcccactcccagtgctactcctcttactcccgtgtgatcgctggcaccgtgttcgtggcttaccaccgtgactcctacgagaacaagaccatgcagctgatgcccgacgactactccaacacccactccacccgttacgtgaccgtgaaggaccagtggcactcccgtggttccacctggctgtaccgtgaaacctgcaacctgaactgcatggtcaccatcaccaccgctcgttccaagtacccttaccacttcttcgctacctccaccggcgacgtggtggacatctcccccttctacaacggtactaaccgtaacgcttcctacttcggcgagaacgctgacaagttcttcatcttccccaactacaccatcgtgtccgacttcggtcgtcccaactccgctctggaaacccaccgtctggtggctttcttggagcgtgctgactccgtgatctcctgggacatccaggacgagaagaacgtgacctgccagctgaccttctgggaggcttccgagcgtaccatccgttccgaggctgaggactcctaccacttctccagcgctaagatgaccgctaccttcctgtccaagaaacaagaggtcaacatgtccgactccgccctggactgcgtgcgtgacgaggctatcaacaagctgcagcagatcttcaacacctcctacaaccagacctacgagaagtacggaaacgtgtccgtgttcgagactaccggtggcctggtggtgttctggcagggtatcaagcagaagtccctggtcgagctggaacgtctggctaaccgttcctccctgaacctgacccacaaccgtaccaagcgttccaccgacggcaacaacgctactcacctgtccaacatggaatccgtgcacaacctggtgtacgctcagctgcagttcacctacgacaccctgcgcggttacatcaaccgtgctctggctcagatcgctgaggcttggtgcgtggaccagcgtcgtaccctggaagtgttcaaggaactgtccaagatcaacccctccgctatcctgtccgccatctacaacaagcctatcgctgctcgtttcatgggcgacgtgctgggcctggcttcctgcgtgaccatcaaccagacttccgtgaaggtgctgcgtgacatgaacgtgaaggaatcccccggtcgttgctactcccgtcccgtggtcatcttcaacttcgctaactcctcctacgtgcagtacggccagctgggcgaggacaacgagatcctgctgggcaaccaccgtaccgaggaatgccagctgccctccctgaagatcttcatcgctggcaactccgcttacgaatacgtggactacctgttcaagcgcatgatcgacctgtcctccatctctaccgtggactccatgatcgctctggacatcgaccccctggaaaacaccgacttccgtgtgctggaactgtactcccagaaggaactgcgttccatcaacgtgttcgacctggaagagatcatgcgcgagttcaactcctacaagcagcgtgttaagtacgtcgaggacaaggtggtggaccccctgcccccctacctgaagggactggacgacctgatgtccggcctgggagctgccggcaaggctgtgggtgtcgctatcggtgctgtgggtggtgctgtggcttccgtggtcgagggtgtcgccaccttcctgaagaaccccttcggtgctttcaccatcatcctggtggctatcgctgtggtcatcatcatctacctgatctacacccgtcagcgtcgtctgtgcatgcagcccctgcagaacctgttcccctacctggtgtccgctgacggtactaccgtgacctccggcaacaccaaggacacctccctgcaggctcccccatcctacgaggaatccgtctacaactccggtcgcaagggtcccggtcccccttcctccgacgcttctaccgctgctcccccatacaccaacgagcaggcttaccagatgctgctggctctcgtgcgtctggacgctgagcagcgtgcacagcagaacggcaccgactccctggacggccagaccggaacccaggacaagggccagaagcccaacctgctggaccgtctgcgtcaccgcaagaacggttaccgtcacctgaaggactccgacgaggaagagaacgtctaaggcgcgccaagcttgtcgagaagtactagagatcataatcagccataccacatttgtagaggttttacttgctttaaaaaacctcccacacctccccctgaacctgaaacataaaatgaatgcaattgttgttgttaacttgtttattgcagcttataatggttacaaataaagcaatagcatcacaaatttcacaaataaagcatttttttcactgcattctagttgtggtttgtccaaactcatcaatgtatcttatcatgtctggatctgatcactgcttgagcctagaagatccggctgctaacaaagcccgaaaggaagctgggaatattaatagatcatggagataattaaaatgataaccatctcgcaaataaataagtattttactgttttcgtaacagttttgtaataaaaaaacctataaatattccggattattcataccgtcccaccatcgggcgcggatccgccaccatgcgtcccggcctgccctcctacctgatcgtgctggctgtgtgcctgctgtcccacctcctgtcctcccgttacggtgctgaggctatctccgagcccctggacaaggctttccacctcctgctgaacacctacggtcgtcctatccgtttcctgcgcgagaacaccacccagtgcacctacaactcctccctgcgcaactccaccgtcgtccgcgagaacgctatctccttcaacttcttccagtcctacaaccagtactacgtgttccacatgccccgttgcctgttcgctggtcccctggctgagcagttcctgaaccaggtggacctgaccgagactctcgagcgttaccagcagcgtctgaacacttacgctctggtgtccaaggacctggcttcctaccgttccttcagccagcagctgaaggctcaggactccctgggcgagcagcccaccactgtgcctccccctatcgacctgtccatcccccacgtgtggatgcccccccagaccactcctcacggctggaccgagtcccacaccacctccggactgcaccgtccccacttcaaccagacctgcatcctgttcgacggtcacgacctgctgttctccaccgtgaccccctgcctgcaccagggcttctacctcatcgacgagctgcgttacgtgaagatcaccctgaccgaggatttcttcgtggtcaccgtgtccatcgacgacgacacccccatgctgctgatcttcggtcacctcccccgtgtgctgttcaaggctccctaccagcgtgacaacttcatcctgcgtcagaccgagaagcacgagctgctggtgctggtcaagaaggaccagctgaaccgtcactcttacctgaaggaccccgacttcctggacgctgctctggacttcaactacctggacctgtccgctctgctgaggaactccttccaccgttacgctgtggacgtgctgaagtccggtcgttgccagatgctggaccgtcgtaccgtcgagatggctttcgcttacgccctggctctgttcgctgctgctcgtcaagaagaggctggcgctcaggtgtccgtgccccgtgctctggaccgtcaggctgctctgctgcagatccaagagttcatgatcacttgcctgtcccagaccccccctcgtaccaccctgctgctgtaccccaccgctgtggacctggctaagcgtgctctgtggacccccaaccagatcaccgacatcacctccctcgtgcgtctggtgtacatcctgtccaagcagaaccagcagcacctgatcccccagtgggctctgcgtcagatcgctgacttcgctctgaagctgcacaagacccacctggcttcattcctcagcgctttcgctcgccaagagctgtacctgatgggttccctggtgcactccatgctggtgcacaccaccgagcgtcgcgagatcttcatcgtggaaaccggcctgtgctccctggccgagctgtcccacttcacccagctgctggctcacccccaccacgagtacctgtccgacctgtacaccccctgctcctcttccggtcgtcgtgaccactccctggaacgtctgacccgtctgttccccgacgctaccgtgcctaccaccgtgcctgctgctctgtccatcctgtctaccatgcagccctccaccctggaaaccttccccgacctgttctgcctgcctctgggcgagtccttctccgctctgaccgtgtccgagcacgtgtcctacgtggtcaccaaccagtacctgatcaagggcatctcctaccccgtgtccaccaccgtcgtgggccagtccctgatcatcacccagaccgactcccagaccaagtgcgagctgacccgtaacatgcacaccactcactccatcaccgctgctctgaacatctccctcgagaactgcgctttctgccagtccgctctgttggagtacgacgacactcagggtgtcatcaacatcatgtacatgcacgactccgacgacgtgctgttcgctctggacccctacaacgaggtggtggtgtcctccccccgtacccactacctgatgctgctgaagaacggcaccgtgctggaagtgaccgacgtggtggtggacgctaccgaccgtctgctgatgatgtccgtgtacgctctgtccgctatcatcggcatctacctgctgtaccgtatgctgaagacctgctaaggcgccaagctttgtcgagaagtactagaggatcataatcagccataccacatttgtagaggttttacttgctttaaaaaacctcccacacctccccctgaacctgaaacataaaatgaatgcaattgttgttgttaacttgtttattgcagcttataatggttacaaataaagcaatagcatcacaaatttcacaaataaagcatttttttcactgcattctagttgtggtttgtccaaactcatcaatgtatcttatcatgtctggatctgatcactgcttgagcctagaagatccggctgctaacaaagcccgaaaggaagctgagttggctgctgccaccgctgagcaataactatcataacccctaggagatccgaaccagataagtgaaatctagttccaaactattttgtcatttttaattttcgtattagcttacgacgctacacccagttcccatctattttgtcactcttccctaaataatccttaaaaactccatttccacccctcccagttcccaactattttgtccgcccaca

SEQ ID NO: 47 - DNA, 29520 bp, Artificial Sequence
  Synthetic construct
ttgttccagtttggaacaagagtccactattaaagaacgtggactccaacgtcaaagggcgaaaaaccgtctatcagggcgatggcccactacgtgaaccatcaccctaatcaagttttttggggtcgaggtgccgtaaagcactaaatcggaaccctaaagggagcccccgatttagagcttgacggggaaagccggcgaacgtggcgagaaaggaagggaagaaagcgaaaggagcgggcgctagggcgctggcaagtgtagcggtcacgctgcgcgtaaccaccacacccgccgcgcttaatgcgccgctacagggcgcgtccattcgccattcaggctgcgcaactgttgggaagggcgatcggtgcgggcctcttcgctattacgccagctggcgaaagggggatgtgctgcaaggcgattaagttgggtaacgccagggttttcccagtcacgacgttgtaaaacgacggccagtgcatagaccagccgcgtaacctggcaaaatcggttacggttgagtaataaatggatgccctgcgtaagcgggtgtgggcggacaataaagtcttaaactgaacaaaatagatctaaactatgacaataaagtcttaaactagacagaatagttgtaaactgaaatcagtccagttatgctgtgaaaaagcatactggacttttgttatggctaaagcaaactcttcattttctgaagtgcaaattgcccgtcgtattaaagaggggcgtggccaagggcatggtaaagactatattcgcggcgttgtgacaatttaccgaacaactccgcggccgggaagccgatctcggcttgaacgaattgttaggtggcggtacttgggtcgatatcaaagtgcatcacttcttcccgtatgcccaactttgtatagagagccactgcgggatcgtcaccgtaatctgcttgcacgtagatcacataagcaccaagcgcgttggcctcatgcttgaggagattgatgagcgcggtggcaatgccctgcctccggtgctcgccggagactgcgagatcatagatatagatctcactacgcggctgctcaaacttgggcagaacgtaagccgcgagagcgccaacaaccgcttcttggtcgaaggcagcaagcgcgatgaatgtcttactacggagcaagttcccgaggtaatcggagtccggctgatgttgggagtaggtggctacgtctccgaactcacgaccgaaaagatcaagagcagcccgcatggatttgacttggtcagggccgagcctacatgtgcgaatgatgcccatacttgagccacctaactttgttttagggcgactgccctgctgcgtaacatcgttgctgctgcgtaacatcgttgctgctccataacatcaaacatcgacccacggcgtaacgcgcttgctgcttggatgcccgaggcatagactgtacaaaaaaacagtcataacaagccatgaaaaccgccactgcgccgttaccaccgctgcgttcggtcaaggttctggaccagttgcgtgagcgcatacgctacttgcattacagtttacgaaccgaacaggcttatgtcaactgggtttgtgccttcatccgtttccacggtgtgcgtcacccggcaaccttgggcagcagcgaagtcgaggcatttctgtcctggctggcgaacgagcgcaaggtttcggtctccacgcatcgtcaggcattggcggccttgctgttcttctacggcaaggtgctgtgcacggatctgcccttgcttcaggagatcggtagacctcggccgtcgcggcgcttgccggtggtgctgaccccggatgaagtggttcgcatcctcggttttctggaaggcgagcatcgtttgttcgcccaggactctagctatagttctagtggttggctacagctttgtttgtactatcaacaggttgaactgctgatcaacagatcctctacgcggccgcggtaccataacttcgtatagcatacattatacgaagttatctggtttaaacgtacccgtagtggctatggcagggcttgccgccccgacgttggctgcgagccctgggccttcacccgaacttgggggttggggtggggaaaaggaagaaacgcgggcgtattggtcccaatggggtctcggtggggtatcgacagagtgccagccctgggaccgaaccccgcgtttatgaacaaacgacccaacacccgtgcgttttattctgtctttttattgccgtcatagcgcgggttccttccggtattgtctccttccgtgtttcagttagcctcccccatctcccggtaccgcatgctatgcatcagctgctagcaccatggctcgagatcccgggtgatcaagtcttcgtcgagtgattgtaaataaaatgtaatttacagtatagtattttaattaatatacaaatgatttgataataattcttatttaactataatatattgtgttgggttgaattaaaggtccgtatactagtatcgattcgcgacctactccggaatattaatagatcatggagataattaaaatgataaccatctcgcaaataaataagtattttactgttttcgtaacagttttgtaataaaaaaacctataaatattccggattattcataccgtcccaccatcgggcgcggatccgccaccatggaaaactggtccgctctggaactgctgcccaaggtcggaatccctaccgacttcctgacccacgtcaagacctccgctggcgaggaaatgttcgaggctctgaggatctactacggcgacgaccccgagcgttacaacatccacttcgaggctatcttcggcaccttctgcaaccgtctggaatgggtgtacttcctgacttccggcctggctgctgctgctcacgctatcaagttccacgacctgaacaagctgaccaccggcaagatgctgttccacgtgcaagtgccccgtgtggcttccggtgctggcctgcctacctcccgtcagaccaccatcatggtcaccaagtactccgagaagtcccccatcaccatccctttcgagctgtccgctgcttgcctgacttacctgcgtgaaaccttcgagggcaccatcctggacaagatcctgaacgtcgaggctatgcacaccgtgctgcgtgctctgaagaacaccgctgacgctatggaacgtggcctgatccacagcttcctccagaccctgctgaggaaggctcccccctacttcgtggtgcagaccctggtcgagaacgctaccctggctcgtcaggctctgaaccgtatccagcgctccaacatcctgcagtccttcaaggctaagatgctggctaccctgttcctgctgaaccgtacccgtgaccgtgactacgtgctgaagttcctgacccgtctggctgaggctgctaccgactccatcctcgacaaccctactacctacaccacctcctccggtgctaagatctccggtgtcatggtgtccaccgctaacgtgatgcagatcatcatgtccctgctgtcctcccacatcactaaggaaaccgtgtccgctcccgctacctacggcaacttcgtgctgtcccccgagaacgctgtgaccgctatctcctaccactctatcctggctgacttcaactcctacaaggctcacctgacctccggccagccccacctccccaacgactccctgagccaggctggtgctcactccctgacccccctgtccatggacgtgatccgtctgggcgaaaagaccgtgatcatggaaaacctgcgtcgcgtgtacaagaacaccgacaccaaggaccccctggaacgtaacgtggacctgaccttcttcttccccgtgggcctgtacctgcccgaggaccgtggttacaccaccgtcgagtccaaggtcaagctgaacgacaccgtgcgtaacgctctgcccaccaccgcttacctgctgaacagggaccgtgctgtgcaaaagatcgacttcgtggacgctctcaagaccctgtgccaccccgtgctgcacgagcctgctccatgcctgcaggctttcaccgagcgtggtcccccatccgagcccgctatgcagcgtctgctggaatgccgtttccagcaagagcccatgggtggtgctgctcgtcgtatcccccacttctaccgtgtgcgccgcgaggtgccccgtaccgtgaacgagatgaagcaggacttcgtggtcaccgacttctacaaggttggaaacatcaccctgtacaccgagctgcaccctttcttcgacttcacccactgccaagagaactccgagactgtggctctgtgcaccccccgtatcgtgatcggcaacctgcccgacggcctggctcccggtcccttccacgagctgaggacctgggagatcatggaacacatgcgcctgcgtcccccacccgactacgaggaaaccctgcgtctgttcaagaccaccgtgacctcccccaactaccccgagctgtgctacctggtggacgtgctggtgcacggcaacgctgacgctttcctgctgatccgcgctttcatcgctcgttgcatcgtgaacatgttccacacccgtcagctgctggtgttcgctcactcctacgctctggtcaccctgatcgctgagcacctggctgacggtgctctgcccccccagctcctgttccactaccgtaacctggtggctgtgctgcgcctggtcacccgtatctccgctctgcccggcctgaacaacggccagctggctgaggaacccctgtccgcttacgtgaacgctctgcacgaccacaggctgtggccccccttcgtgacccacctccctcgtaacatggaaggtgtccaggtggtggctgatcgtcagcccctgaaccccgctaacatcgaggctcgtcaccacggtgtctccgacgtgccccgtctgggtgctatggacgctgacgagcccctgttcgtggacgactaccgtgctaccgacgacgagtggaccctgcaaaaggtgttctacctgtgcctgatccccgctatgaccaacaaccgtgcttgcggcctgggcctgaacctcaagactctgctggtggacctgttctaccgtcccgccttcctgctcatgcccgctgctaccgctgtgtccacctccggcaccacctccaaggaatccacctctggtgtcacccccgaggactccgtggctgctcagcgtcaggctgtgggcgagatgctgaccgagctggtcgaggacgtggccaccgacgctcacacccctctgctgcaggcttgccgcgagctgttcctggctgtgcagttcgtgggcgagcacgtgaaggtgctggaagtgcgtgctcccctggaccacgctcagaggcagggactgcccgacttcatctcccgtcagcatgtgctgtacaacggttgctgcgtcgtgaccgctcctaagaccctgatcgagtactccctgcccgtgcccttccaccgtttctactccaaccccaccatctgcgctgctctgtccgacgacatcaagcgttacgtgaccgagttcccccactaccatagacacgatggtggtttccccctgcccaccgctttcgctcacgagtaccacaactggctgcgtagccccttctcccgttactccgctacctgccccaacgtgctgcactccgtgatgaccctggctgctatgctgtacaagatctcccccgtgtccctggtgctgcagaccaaggctcacatccaccccggtttcgctctgaccgctgtgcgtaccgacaccttcgaggtggacatgctgctgtactccggcaagtcctgcacctccgtcatcatcaacaaccccatcgtgaccaaggaagagagggacatctccaccacctaccacgtgacccagaacatcaacaccgtggacatgggcctgggttacacctccaacacttgcgtggcctacgtgaaccgcgtccgcaccgacatgggtgtccgtgtgcaggacctgttccgtgtgttccccatgaacgtgtaccgccacgatgaggtggaccgttggatcaggcacgctgctggcgtcgagcgtccccagctgctggacaccgagactatctccatgctgaccttcggttccatgtccgagcgcaacgctgctgctaccgtgcacggccagaaggctgtctgcgagctgatcctgacccctgtgactatggacgtgaactacttcaagatcaccaacaaccctcgtggtcgtgcttcctgcatgctgggcgtggacccctacgacaccgaggctgccaccaaggctatctacgaccaccgcgaggctgacgctcagaccttcgctgctacccacaacccatgggcttcccaggctggttgcctgtccgacgtcctgtacaacacccgtcaccgcgagcgtctgggctacaactccaagttctactccccctgcgctcagtacttcaacaccgaggaaatcatcgctgccaacaagaccctcttcaagaccatcgacgagtacctgctgcgcgctaaggactgcatccgtggcgacaccgacactcagtacgtgtgcgtcgagggaaccgagcagctgatcgagaacccttgccgtctgacccaagaggctctgcccatcctgtccaccaccaccctggctctgatggaaactaagctgaagggtggcgctggtgctttcgctacctccgagactcacttcggcaactacgtcgtgggagagatcatccccctgcagcagtccatgctgttcaacagctaagagctcaagcttgtcgagaagtactagaggatcataatcagccataccacatttgtagaggttttacttgctttaaaaaacctcccacacctccccctgaacctgaaacataaaatgaatgcaattgttgttgttaacttgtttattgcagcttataatggttacaaataaagcaatagcatcacaaatttcacaaataaagcatttttttcactgcattctagttgtggtttgtccaaactcatcaatgtatcttatcatgtctggatctgatcactgcttgagcctagaagatccggctgctaacaaagcccgaaaggaagctgagttggctgctgcccaccgctgagcaataactatcataacccccggaatattaatagatcatggagataattaaaatgataaccatctcgcaaataaataagtattttactgttttcgtaacagttttgtaataaaaaaacctataaatattccggattattcataccgtcccaccatcgggcgcggatccgccaccatggctgctatggaagctaacatcttctgcaccttcgaccacaagctgtctatcgctgacgtgggcaagctgaccaagctggtggctgctgtggtgcccatcccccagcgtctgcacctgatcaagcactaccagctgggcctgcaccagttcgtggaccacacccgtggttacgtgcgtctgcgtggcctgctgcgtaacatgaccctgaccctgatgcgtcgtgtcgagggcaaccagatcctgctgcacgtgcccacccacggcctgctgtacaccgtgctgaacaccggtcccgtgacctgggagaagggcgacgctctgtgcgtgctgccccccctgttccacggtcccctggctcgtgaaaacctgttgaccctgggccagtgggagctggtgctgccctggatcgtgcccatgcccctggctctggaaatcaaccagcgcctgctgatcatgggcctgttctccctggaccgttcctacgaagaagtgaaggctgctgtccagcagctgcagaccatcaccttccgtgacgctaccttcaccatccccgaccccgtgatcgaccagcacctcctgatcgacatgaagaccgcttgcctgtccatgtccatggtggctaacctggcttccgagctgaccatgacctacgtccgcaagctggctttggaggactcttccatgctgctggtcaagtgccaagagctgctgatgcgtctggaccgcgagcgttccgtgggcgagcctcgtactcccgctcgtcctcagcacgtgtcccccgacgacgagatcgctcgtctgtccgctctgttcgtgatgctgcgtcagctggacgacctgatccgcgagcaggtcgtgttcaccgtgtgcgacgtgagcccagacaacaagtccgctacctgcatcttcaagggctaaggcgcgccaagcttgtcgagaagtactagaggatcataatcagccataccacatttgtagaggttttacttgctttaaaaaacctcccacacctccccctgaacctgaaacataaaatgaatgcaattgttgttgttaacttgtttattgcagcttataatggttacaaataaagcaatagcatcacaaatttcacaaataaagcatttttttcactgcattctagttgtggtttgtccaaactcatcaatgtatcttatcatgtctggatctgatcactgcttgagcctagaagatccggctgctaacaaagcccgaaaggaagctgagttggctgctgccaccgctgagcaataactatcataacccccggaatattaatagatcatggagataattaaaatgataaccatctcgcaaataaataagtattttactgttttcgtaacagttttgtaataaaaaaacctataaatattccggattattcataccgtcccaccatcgggcgcggatcccggtccgaagcgcgcggaattcaaaggcctgccaccatggaaatgaacaaggtgctgcatcaggatctggtgcaggctacccgtcgtatcctgaagctgggcccctccgagctgcgtgtgaccgacgctggcctgatctgcaagaaccccaactactccgtgtgcgacgctatgctcaagaccgacaccgtgtactgcgtcgagtacctgctgtcctactgggagtcccgtaccgaccacgtgccctgcttcatcttcaagaacaccggttgcgctgtgtccctgtgctgcttcgtgcgtgctcccgtgaagctggtgtcccctgctcgtcacgtgggcgagttcaacgtgctgaaggtcaacgagtccctgatcgtgaccctgaaggacatcgaggaaatcaagccctccgcttacggtgtcctgactaagtgcgtcgtccgcaagtccaactccgcttccgtgttcaacatcgagctgatcgctttcggtcccgagaacgagggcgagtacgagaacctgctgcgcgagctgtacgctaagaaggctgcttccacctccctggctgtgcgtaaccacgtgaccgtgtcctcccactccggttccggtccctccctgtggcgtgctcgtatgtccgctgctctgacccgtaccgctggcaagcgctcctccaggactgctagccctccaccaccacctcctcgtcaccctagctgctctcccactatggtggctgctggtggagctgctgctggtcctagacctccccctcctcctatggctgctggatcctggcgtctgtgccgttgcgaggcttgcatgggccgttgcggttgcgcttccgagggcgacgctgacgaggaagaggaagagttgctggctctggctggcgagggcaaggctgctgctgccgctgccggtcaagacgtcggtggttccgctcgtcgtcccctcgaggaacacgtgtcccgtcgtcgtggtgtctccacccaccaccgtcaccccccttccccaccttgcgctccctccctggaacgtaccggttaccgttgggctccttcctcctggtggcgcgctcgttctggtccttcccgtccccagtccggtccctggctgcctgctcgtttcgctaccctgggtcccctggtcctggctctgctgttggtgctggccctgctgtggcgtggtcacggtcaatcccccagccccacccgttccgctcaccgtgactaaaagcttgtcgagaagtactagaggatcataatcagccataccacatttgtagaggttttacttgctttaaaaaacctcccacacctccccctgaacctgaaacataaaatgaatgcaattgttgttgttaacttgtttattgcagcttataatggttacaaataaagcaatagcatcacaaatttcacaaataaagcatttttttcactgcattctagttgtggtttgtccaaactcatcaatgtatcttatcatgtctggatctgatcactgcttgagcctagaagatccggctgctaacaaagcccgaaaggaagctgagttggctgctgtggctagctttgtttaactttaagaaggagatacatctagaaatattaatagatcatggagataattaaaatgataaccatctcgcaaataaataagtattttactgttttcgtaacagttttgtaataaaaaaacctataaatattccggattattcataccgtcccaccatcgggcgcggatcccggtccgaagcgcgcggaattcaaaggcctacgtcgacgccaccatgtccaacaccgctcccggtcccaccgtggctaacaagcgtgacgagaagcaccgtcacgtggtcaacgtggtgctcgagctgcccaccgagatctccgaggctacccaccccgtgctggctaccatgctgtccaagtacacccgtatgtcctccctgttcaacgacaagtgcgctttcaagctggacctgctgcgtatggtggctgtgtcccgtacccgtcgctaaaagcttgtcgagaagtactagaggatcataatcagccataccacatttgtagaggttttacttgctttaaaaaacctcccacacctccccctgaacctgaaacataaaatgaatgcaattgttgttgttaacttgtttattgcagcttataatggttacaaataaagcaatagcatcacaaatttcacaaataaagcatttttttcactgcattctagttgtggtttgtccaaactcatcaatgtatcttatcatgtctggatctgatcactgcttgagcctagaagatccggctgctaacaaagcccgaaaggaagctgagttggctgctgggtgcctaatgagtgagctaactcacattaattgcccggaatattaatagatcatggagataattaaaatgataaccatctcgcaaataaataagtattttactgttttcgtaacagttttgtaataaaaaaacctataaatattccggattattcataccgtcccaccatcgggcgcggatcccggtccgaagcgcgcggaattcgccaccatggacgctcgtgctgtggctaagcgtccccgtgaccccgctgacgaggacaacgagctggtcaccgctctgaaggctaagcgtgaagtgaacaccatctccgtgcgttacctgtaccacgctgaccaccaggctctgaccgctcgtttcttcgtgcccgagggcctggtcgagttcgaggctcagcccggtgctctgctgatccgtatggaaaccggttgcgactccccccgtcacctgtacatctccctgtacctgctgggtatccgtgcttccaacgtgtccgcttccacccgttgcctgctcgagtccgtgtacaccgcttccgctgctcgtgctgctctgcagtggctggacctgggtccccacctcctgcaccgtcgtctggaaaccctgggttgcgtcaagaccgtgtccctgggtatcacctccctgctgacctgcgtgatgcgcggctacctgtacaacaccctcaagaccgaggtgttcgctctgatgatccccaaggacatgtacctgacctgggaggaaacccgcggtcgtctgcagtacgtgtacctgatcatcgtgtacgactacgacggtcccgagactcgtcccggtatctacgtgctgacctcctctatcgctcactggcagaccctggtggacgtggcccgtggaaagttcgctcgtgaacgctgctccttcgtgaaccgtcgtatcacccgtccccgtcagatccccctgtgcaccggtgtcatccaaaagctgggctggtgcctggctgacgacatccacacctcattcctcgtgcacaaggaactgaagctgtccgtcgtgcgtctggacaacttctccgtcgagctgggcgacttccgcgagttcgtgcagctgttgaattttgaccttcttaagcttgcgggagacgtcgagtccaaccctgggcccatggaatcccgtggtcgtcgttgccccgagatgatctccgtgctgggtcccatctccggtcacgtcctgaaggctgtgttctcccgtggcgacacccccgtgctgccccacgaaactcgtctgctgcagaccggtatccacgtgcgtgtgtcccagccctccctgatcctggtgtcccagtacacccccgactccaccccttgccaccgcggagacaaccagctgcaggtccagcacacctacttcaccggttccgaggtcgagaacgtgtccgtgaacgtgcacaaccccaccggtcgttccatctgcccctcccaagagcccatgtccatctacgtgtacgctctgcccctgaagatgctgaacatcccctccatcaacgtgcaccactacccctccgctgctgagcgcaagcaccgtcacctccccgtggctgacgctgtgatccacgcttccggcaagcagatgtggcaggctcgtctgaccgtgtccggcctggcttggacccgtcagcagaaccagtggaaggaacccgacgtgtactacacctccgctttcgtgttccccaccaaggacgtggccctgcgtcacgtcgtgtgcgctcacgaactcgtgtgctccatggaaaacacccgtgctaccaagatgcaagtgatcggcgaccagtacgtgaaggtgtacctggaatccttctgcgaggacgtgccctccggcaagctgttcatgcacgtgaccctgggttccgacgtggaagaggacctgaccatgacccgtaacccccagcccttcatgcgtccccacgagcgtaacggtttcaccgtgctgtgccccaagaacatgatcatcaagcccggcaagatctcccacatcatgctggacgtggccttcacctcccacgagcacttcggcctgctgtgccctaagtccatccccggcctgtccatctccggcaacctgctgatgaacggccagcagatcttcctggaagtgcaggctatccgtgaaaccgtcgagctgcgtcagtacgaccctgtggctgctctgttcttcttcgacatcgacctgctgctgcagcgtggtccccagtactccgagcaccccaccttcaccagccagtaccgtatccagggcaagctggaataccgtcacacctgggaccgtcacgacgagggtgctgctcagggcgacgacgacgtgtggacctccggttccgactccgacgaggaactggtcaccaccgagcgcaagaccccccgtgtgaccggtggtggtgctatggctggtgcttccacctccgctggtcgcaagcgcaagtccgcttcctccgctaccgcttgcaccgctggtgtcatgacccgtggtcgcctgaaggctgagtccaccgtggctcccgaagaggacactgacgaggactccgacaacgagatccacaaccccgctgtgttcacctggcccccctggcaggctggtatcctggctcgtaacctggtgcccatggtggctaccgtgcagggccagaacctgaagtaccaagagttcttctgggacgccaacgacatctaccgtatcttcgctgagctggaaggcgtgtggcagcccgctgctcagcccaagcgtcgtcgtcaccgtcaggacgctctgcctggtccctgtatcgcttccacccccaagaagcaccgcggctaaaagcttgtcgagaagtactagaggatcataatcagccataccacatttgtagaggttttacttgctttaaaaaacctcccacacctccccctgaacctgaaacataaaatgaatgcaattgttgttgttaacttgtttattgcagcttataatggttacaaataaagcaatagcatcacaaatttcacaaataaagcatttttttcactgcattctagttgtggtttgtccaaactcatcaatgtatcttatcatgtctggatctgatcactgcttgagcctagaagatccggctgctaacaaagcccgaaaggaagctgagttggctgctgtggctagctttgtttaactttaagaaggagatacatctagacctgcaggccggaatattaatagatcatggagataattaaaatgataaccatctcgcaaataaataagtattttactgttttcgtaacagttttgtaataaaaaaacctataaatattccggattattcataccgtcccaccatcgggcgcggatcccggtccgaagcgcgcggaattcgccaccatgaccatggacgagcagcagccccaggctgtgacccccgtgtacgtgggcggtttcctggctcgttacgaccagtcccccgacgaggctgagctgctgctgccacgtgacgtggtcgaacactggctgcacgctcagggccagggacagccttccctgtccgtggctctgcccctgaacatcaaccacgacgacaccgctgtcgtgggtcacgtggccgctatgcagtccgtgcgtgacggcctgttctgcctgggttgcgtgacctccccccgtttcctggaaatcgtgcgtcgtgcttccgagaagtccgagctggtgtcccgtggtcccgtgtccccactgcagcccgacaaggtggtcgagttcctgtccggttcctacgctggcctgtccctgtcatcccgtcgttgcgacgacgtcgaggctgctacctccctgagcggctccgagactacccccttcaagcacgtggccctgtgctccgtgggtcgtaggcgtggaaccctggctgtgtacggtcgtgaccccgagtgggtcacccagcgtttccccgacctgaccgctgctgaccgtgacggactgcgtgctcagtggcagcgttgcggttccaccgctgtggacgcttccggcgaccccttccgttccgactcctacggcctgctgggcaactccgtggacgctctgtacatccgcgagcgtctgcccaagctgcgttacgacaagcagctcgtgggtgtcaccgagcgcgagtcctacgtgaaggcttccgtgtcccccgaggctgcttgcgacatcaaggctgcttccgctgagcgttctggcgacagccgctcccaggctgctactcctgctgctggtgctcgtgtgccctccagctccccatccccacctgtcgagcctccctcccccgtgcaacctcctgctctgcctgcttccccctccgtgctgcctgctgagtccagcccctccctgtcaccctctgagcctgctgaggctgcctccatgtcccaccctctgagcgctgctgtgactgctgctaccgctccccctggtgctactgtggctggtgcttcccccgctgtgccttccctggcttggcctcacgacggtgtctacctgcccaaggacgctttcttctccctgctgggcgcttcccgttccgctgctcccgtgatgtaccccggtgctgtggctgctccccccagcgcttcacctgctcctctgcccctgccctcctaccccgcttcctacggtgctcccgtcgtgggttacgaccagctggctgctcgtcacttcgctgactacgtggacccccactaccccggctggggtcgtcgttacgagcccgctccttccctgcacccatcctaccctgtgccccctcctccatcacccgcttactaccgtcgtcgtgactcccccggtggcatggacgagcctccatctggatgggagcgttacgacggttcccaccgtggccagtcccaaaagcagcaccgtcacggtggttccggtggtcacaacaagcgtcgcaaggaagccgctgctgcatcctccagctccgacgaggacctgagcttccccggcgaggctgaacacggtcgtgctcgcaagcgtctgaagtcccacgtgaactccgacggaggtagcggaggccacgctggttccaaccagcagcagcaacagcgctacgacgagctgcgtgacgctatccacgagctgaagcgtgacctgttcgctgctcgccagtcctccaccctgctgtctgctgctctgccagctgccgcttcttcctcccctaccaccaccaccgtgtgcacccctactggcgagctgacctctggtggtggcgagactcccaccgctctgctgtccggtggtgctaaggtggccgagcgtgctcaggctggtgtcgtgaacgcttcctgccgtctggctaccgcttccggttccgaggctgccaccgctggtccctctaccgctggttcctcatcctgcccagcttccgtggtgctggctgccgctgctgctcaagccgccgctgcttcacagtcccccccaaaggatatggtggacctgaaccgtcgtatcttcgtggctgctctgaacaagctcgagtaataaaagcttgtcgagaagtactagaggatcataatcagccataccacatttgtagaggttttacttgctttaaaaaacctcccacacctccccctgaacctgaaacataaaatgaatgcaattgttgttgttaacttgtttattgcagcttataatggttacaaataaagcaatagcatcacaaatttcacaaataaagcatttttttcactgcattctagttgtggtttgtccaaactcatcaatgtatcttatcatgtctggatctgatcactgcttgagcctagaagatccggctgctaacaaagcccgaaaggaagctgagttggctgctgccaccgctgagcaataactatcataacccctaggggcctctaaacgggtcttgaggggttttttgctgaaaggaggaactatatccggatctgaacaggagggacagctgatagaaacagaagccactggagcacctcaaaaacaccatcatacactaaatcagtaagttggcagcatcacccgacgcactttgcgccgaataaatacctgtgacggaagatcacttcgcagaataaataaatcctggtgtccctgttgataccgggaagccctgggccaacttttggcgaaaatgagacgttgatcggcacgtaagaggttccaactttcaccataatgaaataagatcactaccgggcgtattttttgagttatcgagattttcaggagctaaggaagctaaaatggagaaaaaaatcactggatataccaccgttgatatatcccaatggcatcgtaaagaacattttgaggcatttcagtcagttgctcaatgtacctataaccagaccgttcagctggatattacggcctttttaaagaccgtaaagaaaaataagcacaagttttatccggcctttattcacattcttgcccgcctgatgaatgctcatccggaattccgtatggcaatgaaagacggtgagctggtgatatgggatagtgttcacccttgttacaccgttttccatgagcaaactgaaacgttttcatcgctctggagtgaataccacgacgatttccggcagtttctacacatatattcgcaagatgtggcgtgttacggtgaaaacctggcctatttccctaaagggtttattgagaatatgtttttcgtctcagccaatccctgggtgagtttcaccagttttgatttaaacgtggccaatatggacaacttcttcgcccccgttttcaccatgggcaaatattatacgcaaggcgacaaggtgctgatgccgctggcgattcaggttcatcatgccgtttgtgatggcttccatgtcggcagaatgcttaatgaattacaacagtactgcgatgagtggcagggcggggcgtaatttttttaaggcagttattggtgcccttaaacgcctggttgctacgcctgaataagtgataataagcggatgaatggcagaaattcgaaagcaaattcgacccggtcgtcggttcagggcagggtcgttaaatagccgcttatgtctattgctggtttaccggtttattgactaccggaagcagtgtgaccgtgtgcttctcaaatgcctgaggccagtttgctcaggctctccccgtggaggtaataattgacgatatgatcatttattctgcctcccagctgacattcatccggggtcagcaccgtttctgcggactggctttctacgtgttccgcttcctttagcagcccttgcgccctgagtgcttgcggcagcgtgaagctaattctgtcagccgttaagtgttcctgtgtcactcaaaattgctttgagaggctctaagggcttctcagtgcgttacatccctggcttgttgtccacaaccgttaaaccttaaaagctttaaaagccttatatattcttttttttcttataaaacttaaaaccttagaggctatttaagttgctgatttatattaattttattgttcaaacatgagagcttagtacgtgaaacatgagagcttagtacgttagccatgagagcttagtacgttagccatgagggtttagttcgttaaacatgagagcttagtacgttaaacatgagagcttagtacgtgaaacatgagagcttagtacgtactatcaacaggttgaactgctgatcaacagatcctctacgcggccgcggtaccataacttcgtatagcatacattatacgaagttatctggtttaaacgtacccgtagtggctatggcagggcttgccgccccgacgttggctgcgagccctgggccttcacccgaacttgggggttggggtggggaaaaggaagaaacgcgggcgtattggtcccaatggggtctcggtggggtatcgacagagtgccagccctgggaccgaaccccgcgtttatgaacaaacgacccaacacccgtgcgttttattctgtctttttattgccgtcatagcgcgggttccttccggtattgtctccttccgtgtttcagttagcctcccccatctcccggtaccgcatgctatgcatcagctgctagcttagcgagcgtccacagcctggggaccgtaacgggagtgagcgggcaggttcacacgggtctgcttcagctcagggggcaggccagcgtagtacttgtccaggtgacgcagcaggggggggtccagctggtgacgcaggcagaattccttcacagcgttgtacaggccgtagaacagggtgataccctcgggagcagcagcggtggacacgggcagacgcacagcacggttggtacgggtagcctcgttacggatagccaccaccacgttgaacagggaggggggcaccagctcgaaacccagcacgtgttcggtgaagatggaacgaccgtaggacagacgagtcaggtcgtaaccacggcacaggtcgtccacgcaagtgtacacagcgggggaaccgtcgccgcactcggagtaaccgcgcatcacggtcatccaacggggagcggtgtcggaggacagcagggtcagcagagcacgcagctggtcggggttgttgtacagcagggccagggtgtccaggaaagcgtcgtccagcagcacggagttagcagcctcgggggtcacgggacggtaacggatcagctgggacaggggaccgtccctacgggtcacgttgaccaggggacgcagccaggactcgtacttgtcgccctggaacacctctcccagcaggcaacgacgggtcagctcggggcactcagcgggcaccttctcagccacggtgggagccacggacacggtagcggaggacacgatgggcagcagcaggcagcaccacagcagagccacgggaccgggggagaaggagaaaccgcagtcgggacgacggcacatggtggctcgagatcccgggtgatcaagtcttcgtcgagtgattgtaaataaaatgtaatttacagtatagtattttaattaatatacaaatgatttgataataattcttatttaactataatatattgtgttgggttgaattaaaggtccgtatactagtatcgattcgcgacctactccggaatattaatagatcatggagataattaaaatgataaccatctcgcaaataaataagtattttactgttttcgtaacagttttgtaataaaaaaacctataaatattccggattattcataccgtcccaccatcgggcgcggatccgccaccatgaactccaaggacctgacccccttcctgaccaccctgtggctgctgctggaccactcccgtgtgcctcgtgtgcgtgctgaggaatgctgcgaagtgatcaacgtgaaccacccccccgagcgctgctacgacttcaagatgtgcaacctgttcaccgtggctctgcgttgccccgacggcgaagtgtgctactcccccgaaaagaccgctgagatccgtggtatcgtgaccaccatgacccactccctgacccgtcaagtgatccacaacaagctgaccagctgcaactacaaccccctgtacctcgaggctgacggtcgtatccgttgcggcaaggtgtccgacaaggctcagtacctgctgggtgctgctggttccgtgccctaccgttggatcaacctcgagtacgacaagatcacccgtatcgtgggcctggaccagtacctcgagtccgtgaagaagcacaagcgtctggacgtgtgccgtgctaagatgggttacatgctgcagtaaaagcttgtcgagaagtactagaggatcataatcagccataccacatttgtagaggttttacttgctttaaaaaacctcccacacctccccctgaacctgaaacataaaatgaatgcaattgttgttgttaacttgtttattgcagcttataatggttacaaataaagcaatagcatcacaaatttcacaaataaagcatttttttcactgcattctagttgtggtttgtccaaactcatcaatgtatcttatcatgtctggatctgatcactgcttgagcctagaagatccggctgctaacaaagcccgaaaggaagctgagttggctgctgtggctagctttgtttaactttaagaaggagatacatctagaccggaatattaatagatcatggagataattaaaatgataaccatctcgcaaataaataagtattttactgttttcgtaacagttttgtaataaaaaaacctataaatattccggattattcataccgtcccaccatcgggcgcggatccgccaccatgctgcgtctgctgctgcgtcaccacttccactgcctgctgctgtgcgctgtgtgggctaccccctgcctggcttccccctggttcaccctgaccgctaaccagaacccctccccaccctggtccaagctgacctaccccaagccccacgacgctgctaccttctactgccccttcctgtacccatccccacctcgttccccatcccagttctccggtttccagcgtgtgtccaccggtcccgagtgccgtaacgagactctgtacctgctgtacaaccgcgagggccagaccctggtcgagaggtcctccacctgggtcaagaaggtcatctggtacttgtccggtcgtaaccagaccatcctgcagcgtatgccccgtaccgcttccaagccctccgacggcaacgtgcagatctccgtcgaggacgctaagatcttcggtgctcacatggtgcccaagcagaccaagctgctgcgtttcgtggtcaacgacggcacccgttaccagatgtgcgtgatgaagctggaatcctgggctcacgtgttccgtgactactccgtgtccttccaagtgcgcctgaccttcaccgaggctaacaaccagacctacaccttctgcacccaccccaacctgatcgtgtaagtcgacaagcttgtcgagaagtactagaggatcataatcagccataccacatttgtagaggttttacttgctttaaaaaacctcccacacctccccctgaacctgaaacataaaatgaatgcaattgttgttgttaacttgtttattgcagcttataatggttacaaataaagcaatagcatcacaaatttcacaaataaagcatttttttcactgcattctagttgtggtttgtccaaactcatcaatgtatcttatcatgtctggatctgatcactgcttgagcctagaagatccggctgctaacaaagcccgaaaggaagctgagttggctgctgggtgcctaatgagtgagctaactcacattaattgcccggaatattaatagatcatggagataattaaaatgataaccatctcgcaaataaataagtattttactgttttcgtaacagttttgtaataaaaaaacctataaatattccggattattcataccgtcccaccatcgggcgcggatccgccaccggatccgccaccatgcgtctgtgccgtgtgtggctgtccgtgtgcctgtgcgctgtggtgctgggacagtgccagcgtgaaaccgctgagaagaacgactactaccgtgtgccccactactgggacgcttgctcccgtgctctgcccgaccagacccgttacaagtacgtcgagcagctggtggacctgaccctgaactaccactacgacgcttcccacggcctggacaacttcgacgtgctgaagcgtatcaacgtgaccgaggtgtccctgctgatctccgacttccgtcgtcagaaccgtcgtggtggcaccaacaagcgtaccaccttcaacgctgctggttccctggctccccacgctcgttccttggagttctccgtgcgtctgttcgccaactaataaaagcttgtcgagaagtactagaggatcataatcagccataccacatttgtagaggttttacttgctttaaaaaacctcccacacctccccctgaacctgaaacataaaatgaatgcaattgttgttgttaacttgtttattgcagcttataatggttacaaataaagcaatagcatcacaaatttcacaaataaagcatttttttcactgcattctagttgtggtttgtccaaactcatcaatgtatcttatcatgtctggatctgatcactgcttgagcctagaagatccggctgctaacaaagcccgaaaggaagctgagttggctgctgccaccgctgagcaataactatcataacccccggaatattaatagatcatggagataattaaaatgataaccatctcgcaaataaataagtattttactgttttcgtaacagttttgtaataaaaaaacctataaatattccggattattcataccgtcccaccatcgggcgcggatcccggtccgaagcgcgcggaattcaaaggcctaccgtcgacgccaccatggaatcccgtatctggtgcctggtcgtgtgcgtgaacctgtgcatcgtgtgcctgggtgctgctgtgtcctcctcctccacccgtggcacctccgctacccactcccaccactcctcccacaccacctccgccgctcactcccgttccggttccgtgtcccagcgtgtgacctcctcccagaccgtgtcccacggtgtcaacgagactatctacaacaccaccctgaagtacggcgacgtcgtgggtgtcaacaccaccaagtacccctaccgtgtgtgctccatggctcagggcaccgacctgatccgtttcgagcgtaacatcgtgtgcacctccatgaagcccatcaacgaggacctggacgagggtatcatggtggtgtacaagcgcaacatcgtggctcacaccttcaaggtccgcgtgtaccagaaggtgctgaccttccgtcgttcctacgcttacatccacaccacttacctgctgggttccaacaccgagtacgtggcccctcccatgtgggagatccaccacatcaactcccactcccagtgctactcctcttactcccgtgtgatcgctggcaccgtgttcgtggcttaccaccgtgactcctacgagaacaagaccatgcagctgatgcccgacgactactccaacacccactccacccgttacgtgaccgtgaaggaccagtggcactcccgtggttccacctggctgtaccgtgaaacctgcaacctgaactgcatggtcaccatcaccaccgctcgttccaagtacccttaccacttcttcgctacctccaccggcgacgtggtggacatctcccccttctacaacggtactaaccgtaacgcttcctacttcggcgagaacgctgacaagttcttcatcttccccaactacaccatcgtgtccgacttcggtcgtcccaactccgctctggaaacccaccgtctggtggctttcttggagcgtgctgactccgtgatctcctgggacatccaggacgagaagaacgtgacctgccagctgaccttctgggaggcttccgagcgtaccatccgttccgaggctgaggactcctaccacttctccagcgctaagatgaccgctaccttcctgtccaagaaacaagaggtcaacatgtccgactccgccctggactgcgtgcgtgacgaggctatcaacaagctgcagcagatcttcaacacctcctacaaccagacctacgagaagtacggaaacgtgtccgtgttcgagactaccggtggcctggtggtgttctggcagggtatcaagcagaagtccctggtcgagctggaacgtctggctaaccgttcctccctgaacctgacccacaaccgtaccaagcgttccaccgacggcaacaacgctactcacctgtccaacatggaatccgtgcacaacctggtgtacgctcagctgcagttcacctacgacaccctgcgcggttacatcaaccgtgctctggctcagatcgctgaggcttggtgcgtggaccagcgtcgtaccctggaagtgttcaaggaactgtccaagatcaacccctccgctatcctgtccgccatctacaacaagcctatcgctgctcgtttcatgggcgacgtgctgggcctggcttcctgcgtgaccatcaaccagacttccgtgaaggtgctgcgtgacatgaacgtgaaggaatcccccggtcgttgctactcccgtcccgtggtcatcttcaacttcgctaactcctcctacgtgcagtacggccagctgggcgaggacaacgagatcctgctgggcaaccaccgtaccgaggaatgccagctgccctccctgaagatcttcatcgctggcaactccgcttacgaatacgtggactacctgttcaagcgcatgatcgacctgtcctccatctctaccgtggactccatgatcgctctggacatcgaccccctggaaaacaccgacttccgtgtgctggaactgtactcccagaaggaactgcgttccatcaacgtgttcgacctggaagagatcatgcgcgagttcaactcctacaagcagcgtgttaagtacgtcgaggacaaggtggtggaccccctgcccccctacctgaagggactggacgacctgatgtccggcctgggagctgccggcaaggctgtgggtgtcgctatcggtgctgtgggtggtgctgtggcttccgtggtcgagggtgtcgccaccttcctgaagaaccccttcggtgctttcaccatcatcctggtggctatcgctgtggtcatcatcatctacctgatctacacccgtcagcgtcgtctgtgcatgcagcccctgcagaacctgttcccctacctggtgtccgctgacggtactaccgtgacctccggcaacaccaaggacacctccctgcaggctcccccatcctacgaggaatccgtctacaactccggtcgcaagggtcccggtcccccttcctccgacgcttctaccgctgctcccccatacaccaacgagcaggcttaccagatgctgctggctctcgtgcgtctggacgctgagcagcgtgcacagcagaacggcaccgactccctggacggccagaccggaacccaggacaagggccagaagcccaacctgctggaccgtctgcgtcaccgcaagaacggttaccgtcacctgaaggactccgacgaggaagagaacgtctaaggcgcgccaagcttgtcgagaagtactagagatcataatcagccataccacatttgtagaggttttacttgctttaaaaaacctcccacacctccccctgaacctgaaacataaaatgaatgcaattgttgttgttaacttgtttattgcagcttataatggttacaaataaagcaatagcatcacaaatttcacaaataaagcatttttttcactgcattctagttgtggtttgtccaaactcatcaatgtatcttatcatgtctggatctgatcactgcttgagcctagaagatccggctgctaacaaagcccgaaaggaagctgggaatattaatagatcatggagataattaaaatgataaccatctcgcaaataaataagtattttactgttttcgtaacagttttgtaataaaaaaacctataaatattccggattattcataccgtcccaccatcgggcgcggatccgccaccatgcgtcccggcctgccctcctacctgatcgtgctggctgtgtgcctgctgtcccacctcctgtcctcccgttacggtgctgaggctatctccgagcccctggacaaggctttccacctcctgctgaacacctacggtcgtcctatccgtttcctgcgcgagaacaccacccagtgcacctacaactcctccctgcgcaactccaccgtcgtccgcgagaacgctatctccttcaacttcttccagtcctacaaccagtactacgtgttccacatgccccgttgcctgttcgctggtcccctggctgagcagttcctgaaccaggtggacctgaccgagactctcgagcgttaccagcagcgtctgaacacttacgctctggtgtccaaggacctggcttcctaccgttccttcagccagcagctgaaggctcaggactccctgggcgagcagcccaccactgtgcctccccctatcgacctgtccatcccccacgtgtggatgcccccccagaccactcctcacggctggaccgagtcccacaccacctccggactgcaccgtccccacttcaaccagacctgcatcctgttcgacggtcacgacctgctgttctccaccgtgaccccctgcctgcaccagggcttctacctcatcgacgagctgcgttacgtgaagatcaccctgaccgaggatttcttcgtggtcaccgtgtccatcgacgacgacacccccatgctgctgatcttcggtcacctcccccgtgtgctgttcaaggctccctaccagcgtgacaacttcatcctgcgtcagaccgagaagcacgagctgctggtgctggtcaagaaggaccagctgaaccgtcactcttacctgaaggaccccgacttcctggacgctgctctggacttcaactacctggacctgtccgctctgctgaggaactccttccaccgttacgctgtggacgtgctgaagtccggtcgttgccagatgctggaccgtcgtaccgtcgagatggctttcgcttacgccctggctctgttcgctgctgctcgtcaagaagaggctggcgctcaggtgtccgtgccccgtgctctggaccgtcaggctgctctgctgcagatccaagagttcatgatcacttgcctgtcccagaccccccctcgtaccaccctgctgctgtaccccaccgctgtggacctggctaagcgtgctctgtggacccccaaccagatcaccgacatcacctccctcgtgcgtctggtgtacatcctgtccaagcagaaccagcagcacctgatcccccagtgggctctgcgtcagatcgctgacttcgctctgaagctgcacaagacccacctggcttcattcctcagcgctttcgctcgccaagagctgtacctgatgggttccctggtgcactccatgctggtgcacaccaccgagcgtcgcgagatcttcatcgtggaaaccggcctgtgctccctggccgagctgtcccacttcacccagctgctggctcacccccaccacgagtacctgtccgacctgtacaccccctgctcctcttccggtcgtcgtgaccactccctggaacgtctgacccgtctgttccccgacgctaccgtgcctaccaccgtgcctgctgctctgtccatcctgtctaccatgcagccctccaccctggaaaccttccccgacctgttctgcctgcctctgggcgagtccttctccgctctgaccgtgtccgagcacgtgtcctacgtggtcaccaaccagtacctgatcaagggcatctcctaccccgtgtccaccaccgtcgtgggccagtccctgatcatcacccagaccgactcccagaccaagtgcgagctgacccgtaacatgcacaccactcactccatcaccgctgctctgaacatctccctcgagaactgcgctttctgccagtccgctctgttggagtacgacgacactcagggtgtcatcaacatcatgtacatgcacgactccgacgacgtgctgttcgctctggacccctacaacgaggtggtggtgtcctccccccgtacccactacctgatgctgctgaagaacggcaccgtgctggaagtgaccgacgtggtggtggacgctaccgaccgtctgctgatgatgtccgtgtacgctctgtccgctatcatcggcatctacctgctgtaccgtatgctgaagacctgctaaggcgccaagctttgtcgagaagtactagaggatcataatcagccataccacatttgtagaggttttacttgctttaaaaaacctcccacacctccccctgaacctgaaacataaaatgaatgcaattgttgttgttaacttgtttattgcagcttataatggttacaaataaagcaatagcatcacaaatttcacaaataaagcatttttttcactgcattctagttgtggtttgtccaaactcatcaatgtatcttatcatgtctggatctgatcactgcttgagcctagaagatccggctgctaacaaagcccgaaaggaagctgagttggctgctgccaccgctgagcaataactatcataacccctaggagatccgaaccagataagtgaaatctagttccaaactattttgtcatttttaattttcgtattagcttacgacgctacacccagttcccatctattttgtcactcttccctaaataatccttaaaaactccatttccacccctcccagttcccaactattttgtccgcccaca

SEQ ID NO: 48 - DNA, 15042 bp, Artificial Sequence
  Synthetic construct
ttgttccagtttggaacaagagtccactattaaagaacgtggactccaacgtcaaagggcgaaaaaccgtctatcagggcgatggcccactacgtgaaccatcaccctaatcaagttttttggggtcgaggtgccgtaaagcactaaatcggaaccctaaagggagcccccgatttagagcttgacggggaaagccggcgaacgtggcgagaaaggaagggaagaaagcgaaaggagcgggcgctagggcgctggcaagtgtagcggtcacgctgcgcgtaaccaccacacccgccgcgcttaatgcgccgctacagggcgcgtcgcgccattcgccattcaggctgcgcaactgttgggaagggcgatcggtgcgggcctcttcgctattacgccagctggcgaaagggggatgtgctgcaaggcgattaagttgggtaacgccagggttttcccagtcacgacgttgtaaaacgacggccagtgcatagaccagccgcgtaacctggcaaaatcggttacggttgagtaataaatggatgccctgcgtaagcgggtgtgggcggacaataaagtcttaaactgaacaaaatagatctaaactatgacaataaagtcttaaactagacagaatagttgtaaactgaaatcagtccagttatgctgtgaaaaagcatactggacttttgttatggctaaagcaaactcttcattttctgaagtgcaaattgcccgtcgtattaaagaggggcgtggccaagggcatggtaaagactatattcgcggcgttgtgacaatttaccgaacaactccgcggccgggaagccgatctcggcttgaacgaattgttaggtggcggtacttgggtcgatatcaaagtgcatcacttcttcccgtatgcccaactttgtatagagagccactgcgggatcgtcaccgtaatctgcttgcacgtagatcacataagcaccaagcgcgttggcctcatgcttgaggagattgatgagcgcggtggcaatgccctgcctccggtgctcgccggagactgcgagatcatagatatagatctcactacgcggctgctcaaacttgggcagaacgtaagccgcgagagcgccaacaaccgcttcttggtcgaaggcagcaagcgcgatgaatgtcttactacggagcaagttcccgaggtaatcggagtccggctgatgttgggagtaggtggctacgtctccgaactcacgaccgaaaagatcaagagcagcccgcatggatttgacttggtcagggccgagcctacatgtgcgaatgatgcccatacttgagccacctaactttgttttagggcgactgccctgctgcgtaacatcgttgctgctgcgtaacatcgttgctgctccataacatcaaacatcgacccacggcgtaacgcgcttgctgcttggatgcccgaggcatagactgtacaaaaaaacagtcataacaagccatgaaaaccgccactgcgccgttaccaccgctgcgttcggtcaaggttctggaccagttgcgtgagcgcatacgctacttgcattacagtttacgaaccgaacaggcttatgtcaactgggttcgtgccttcatccgtttccacggtgtgcgtcacccggcaaccttgggcagcagcgaagtcgaggcatttctgtcctggctggcgaacgagcgcaaggtttcggtctccacgcatcgtcaggcattggcggccttgctgttcttctacggcaaggtgctgtgcacggatctgcccttgcttcaggagatcggtagacctcggccgtcgcggcgcttgccggtggtgctgaccccggatgaagtggttcgcatcctcggttttctggaaggcgagcatcgtttgttcgcccaggactctagctatagttctagtggttggctacagctttgtttgtactatcaacaggttgaactgctgatcaacagatcctctacgcggccgcggtaccataacttcgtatagcatacattatacgaagttatctggtttaaacgtacccgtagtggctatggcagggcttgccgccccgacgttggctgcgagccctgggccttcacccgaacttgggggttggggtggggaaaaggaagaaacgcgggcgtattggtcccaatggggtctcggtggggtatcgacagagtgccagccctgggaccgaaccccgcgtttatgaacaaacgacccaacacccgtgcgttttattctgtctttttattgccgtcatagcgcgggttccttccggtattgtctccttccgtgtttcagttagcctcccccatctcccggtaccgcatgctatgcatcagctgctagcttactgcagccaccaccacagggagttcagggtggacaggttcacagcacgacggtgctcagggggggtcaggttgccgtaggtggaggactgcaggctgaagttacggatctcagacaggaacagcagggagtccaggtagtcccacatggggtcgatgaaggtgcgctggaaacgggtggatggggaggtgggggtggtcttgttgttgtcggaagcagtctcgttctcgacgggcatggtgtcgttgtagtacagggaggacatgtccagggtgccgtagatggtgtagggagtctcgttacggatcagcacgtgagtgttcttcatgaactcggacacagcggtacggttacggttgggcttgcagaagggctcgtcacggtaacgcagggtggtgtacacccaggtagccaggtccttcagctgagtggtcaggatagacttcatgaagttctcgtcgggacggtaaccgatggtagaggtggggatacgggtgggcacgatgggggagtaggtcacgttggtggaaacgttgaagatggtggaggtgtaggaggagtagggggtagtagtgctgacgcgggacttcttggagatggacttcacgggagcctgcttgcgcttcagcttgcgcatggtgttcttcagcttggtggagttgatgtacttgggcacacggaagatgttacgggacatagcgttgaccaggtagaaggaacgggtgcagttgcgctgagcgtaacgcagcagcagagcagccaggcccaggaagtagatagtctgggagtccacgttgaccttggaggggcccacgtacagcttggtgttccaacggggcacgttgaagaacatggggttgaaggtggtgaagttgccgcagttttcctcgccggtgttgttacgacgggacacgttcagcatctcggacaggcaggtcatggaggggatggtgccgcaagaggggggacggaaggtgatcttctggccggtgtggttgtactcggagtacacgtacttagcgggcttgcgcagctgggtggtgtggaagtcgaaccacaggtgggtgatggagtggttacggatgggaccagccaggatggagttgggggggaactgcttcatctcgacggtgatgttgtacagcttctgctggctggggaaggtgaagaacttgtagtagtcgccggtcttggaagccagctcttgcaggatacgcagcttcagctggcgttcctcttccttagccttctgggacttcacacggaaacgagccacagcgatcttgcagttgatgaagctgaacagcaggaaggtcagggacatcaggaagaacaggttgaacacgccacgcatctcgcccttgcgacccatggtggcctcgagatcccgggtgatcaagtcttcgtcgagtgattgtaaataaaatgtaatttacagtatagtattttaattaatatacaaatgatttgataataattcttatttaactataatatattgtgttgggttgaattaaaggtccgtatactagtatcgattcgcgacctactccggaatattaatagatcatggagataattaaaatgataaccatctcgcaaataaataagtattttactgttttcgtaacagttttgtaataaaaaaacctataaatattccggattattcataccgtcccaccatcgggcgcggatccgccaccatggaaaactggtccgctctggaactgctgcccaaggtcggaatccctaccgacttcctgacccacgtcaagacctccgctggcgaggaaatgttcgaggctctgaggatctactacggcgacgaccccgagcgttacaacatccacttcgaggctatcttcggcaccttctgcaaccgtctggaatgggtgtacttcctgacttccggcctggctgctgctgctcacgctatcaagttccacgacctgaacaagctgaccaccggcaagatgctgttccacgtgcaagtgccccgtgtggcttccggtgctggcctgcctacctcccgtcagaccaccatcatggtcaccaagtactccgagaagtcccccatcaccatccctttcgagctgtccgctgcttgcctgacttacctgcgtgaaaccttcgagggcaccatcctggacaagatcctgaacgtcgaggctatgcacaccgtgctgcgtgctctgaagaacaccgctgacgctatggaacgtggcctgatccacagcttcctccagaccctgctgaggaaggctcccccctacttcgtggtgcagaccctggtcgagaacgctaccctggctcgtcaggctctgaaccgtatccagcgctccaacatcctgcagtccttcaaggctaagatgctggctaccctgttcctgctgaaccgtacccgtgaccgtgactacgtgctgaagttcctgacccgtctggctgaggctgctaccgactccatcctcgacaaccctactacctacaccacctcctccggtgctaagatctccggtgtcatggtgtccaccgctaacgtgatgcagatcatcatgtccctgctgtcctcccacatcactaaggaaaccgtgtccgctcccgctacctacggcaacttcgtgctgtcccccgagaacgctgtgaccgctatctcctaccactctatcctggctgacttcaactcctacaaggctcacctgacctccggccagccccacctccccaacgactccctgagccaggctggtgctcactccctgacccccctgtccatggacgtgatccgtctgggcgaaaagaccgtgatcatggaaaacctgcgtcgcgtgtacaagaacaccgacaccaaggaccccctggaacgtaacgtggacctgaccttcttcttccccgtgggcctgtacctgcccgaggaccgtggttacaccaccgtcgagtccaaggtcaagctgaacgacaccgtgcgtaacgctctgcccaccaccgcttacctgctgaacagggaccgtgctgtgcaaaagatcgacttcgtggacgctctcaagaccctgtgccaccccgtgctgcacgagcctgctccatgcctgcaggctttcaccgagcgtggtcccccatccgagcccgctatgcagcgtctgctggaatgccgtttccagcaagagcccatgggtggtgctgctcgtcgtatcccccacttctaccgtgtgcgccgcgaggtgccccgtaccgtgaacgagatgaagcaggacttcgtggtcaccgacttctacaaggttggaaacatcaccctgtacaccgagctgcaccctttcttcgacttcacccactgccaagagaactccgagactgtggctctgtgcaccccccgtatcgtgatcggcaacctgcccgacggcctggctcccggtcccttccacgagctgaggacctgggagatcatggaacacatgcgcctgcgtcccccacccgactacgaggaaaccctgcgtctgttcaagaccaccgtgacctcccccaactaccccgagctgtgctacctggtggacgtgctggtgcacggcaacgctgacgctttcctgctgatccgcgctttcatcgctcgttgcatcgtgaacatgttccacacccgtcagctgctggtgttcgctcactcctacgctctggtcaccctgatcgctgagcacctggctgacggtgctctgcccccccagctcctgttccactaccgtaacctggtggctgtgctgcgcctggtcacccgtatctccgctctgcccggcctgaacaacggccagctggctgaggaacccctgtccgcttacgtgaacgctctgcacgaccacaggctgtggccccccttcgtgacccacctccctcgtaacatggaaggtgtccaggtggtggctgatcgtcagcccctgaaccccgctaacatcgaggctcgtcaccacggtgtctccgacgtgccccgtctgggtgctatggacgctgacgagcccctgttcgtggacgactaccgtgctaccgacgacgagtggaccctgcaaaaggtgttctacctgtgcctgatccccgctatgaccaacaaccgtgcttgcggcctgggcctgaacctcaagactctgctggtggacctgttctaccgtcccgccttcctgctcatgcccgctgctaccgctgtgtccacctccggcaccacctccaaggaatccacctctggtgtcacccccgaggactccgtggctgctcagcgtcaggctgtgggcgagatgctgaccgagctggtcgaggacgtggccaccgacgctcacacccctctgctgcaggcttgccgcgagctgttcctggctgtgcagttcgtgggcgagcacgtgaaggtgctggaagtgcgtgctcccctggaccacgctcagaggcagggactgcccgacttcatctcccgtcagcatgtgctgtacaacggttgctgcgtcgtgaccgctcctaagaccctgatcgagtactccctgcccgtgcccttccaccgtttctactccaaccccaccatctgcgctgctctgtccgacgacatcaagcgttacgtgaccgagttcccccactaccatagacacgatggtggtttccccctgcccaccgctttcgctcacgagtaccacaactggctgcgtagccccttctcccgttactccgctacctgccccaacgtgctgcactccgtgatgaccctggctgctatgctgtacaagatctcccccgtgtccctggtgctgcagaccaaggctcacatccaccccggtttcgctctgaccgctgtgcgtaccgacaccttcgaggtggacatgctgctgtactccggcaagtcctgcacctccgtcatcatcaacaaccccatcgtgaccaaggaagagagggacatctccaccacctaccacgtgacccagaacatcaacaccgtggacatgggcctgggttacacctccaacacttgcgtggcctacgtgaaccgcgtccgcaccgacatgggtgtccgtgtgcaggacctgttccgtgtgttccccatgaacgtgtaccgccacgatgaggtggaccgttggatcaggcacgctgctggcgtcgagcgtccccagctgctggacaccgagactatctccatgctgaccttcggttccatgtccgagcgcaacgctgctgctaccgtgcacggccagaaggctgtctgcgagctgatcctgacccctgtgactatggacgtgaactacttcaagatcaccaacaaccctcgtggtcgtgcttcctgcatgctgggcgtggacccctacgacaccgaggctgccaccaaggctatctacgaccaccgcgaggctgacgctcagaccttcgctgctacccacaacccatgggcttcccaggctggttgcctgtccgacgtcctgtacaacacccgtcaccgcgagcgtctgggctacaactccaagttctactccccctgcgctcagtacttcaacaccgaggaaatcatcgctgccaacaagaccctcttcaagaccatcgacgagtacctgctgcgcgctaaggactgcatccgtggcgacaccgacactcagtacgtgtgcgtcgagggaaccgagcagctgatcgagaacccttgccgtctgacccaagaggctctgcccatcctgtccaccaccaccctggctctgatggaaactaagctgaagggtggcgctggtgctttcgctacctccgagactcacttcggcaactacgtcgtgggagagatcatccccctgcagcagtccatgctgttcaacagctaagagctcaagcttgtcgagaagtactagaggatcataatcagccataccacatttgtagaggttttacttgctttaaaaaacctcccacacctccccctgaacctgaaacataaaatgaatgcaattgttgttgttaacttgtttattgcagcttataatggttacaaataaagcaatagcatcacaaatttcacaaataaagcatttttttcactgcattctagttgtggtttgtccaaactcatcaatgtatcttatcatgtctggatctgatcactgcttgagcctagaagatccggctgctaacaaagcccgaaaggaagctgagttggctgctgtggctagctttgtttaactttaagaaggagatacatctagaccggaatattaatagatcatggagataattaaaatgataaccatctcgcaaataaataagtattttactgttttcgtaacagttttgtaataaaaaaacctataaatattccggattattcataccgtcccaccatcgggcgcggatcccggtccgaagcgcgcggaattcaaaggcctacgtcgacgccaccatggaatcccgtggtcgtcgttgccccgagatgatctccgtgctgggtcccatctccggtcacgtcctgaaggctgtgttctcccgtggcgacacccccgtgctgccccacgaaactcgtctgctgcagaccggtatccacgtgcgtgtgtcccagccctccctgatcctggtgtcccagtacacccccgactccaccccttgccaccgcggagacaaccagctgcaggtccagcacacctacttcaccggttccgaggtcgagaacgtgtccgtgaacgtgcacaaccccaccggtcgttccatctgcccctcccaagagcccatgtccatctacgtgtacgctctgcccctgaagatgctgaacatcccctccatcaacgtgcaccactacccctccgctgctgagcgcaagcaccgtcacctccccgtggctgacgctgtgatccacgcttccggcaagcagatgtggcaggctcgtctgaccgtgtccggcctggcttggacccgtcagcagaaccagtggaaggaacccgacgtgtactacacctccgctttcgtgttccccaccaaggacgtggccctgcgtcacgtcgtgtgcgctcacgaactcgtgtgctccatggaaaacacccgtgctaccaagatgcaagtgatcggcgaccagtacgtgaaggtgtacctggaatccttctgcgaggacgtgccctccggcaagctgttcatgcacgtgaccctgggttccgacgtggaagaggacctgaccatgacccgtaacccccagcccttcatgcgtccccacgagcgtaacggtttcaccgtgctgtgccccaagaacatgatcatcaagcccggcaagatctcccacatcatgctggacgtggccttcacctcccacgagcacttcggcctgctgtgccctaagtccatccccggcctgtccatctccggcaacctgctgatgaacggccagcagatcttcctggaagtgcaggctatccgtgaaaccgtcgagctgcgtcagtacgaccctgtggctgctctgttcttcttcgacatcgacctgctgctgcagcgtggtccccagtactccgagcaccccaccttcaccagccagtaccgtatccagggcaagctggaataccgtcacacctgggaccgtcacgacgagggtgctgctcagggcgacgacgacgtgtggacctccggttccgactccgacgaggaactggtcaccaccgagcgcaagaccccccgtgtgaccggtggtggtgctatggctggtgcttccacctccgctggtcgcaagcgcaagtccgcttcctccgctaccgcttgcaccgctggtgtcatgacccgtggtcgcctgaaggctgagtccaccgtggctcccgaagaggacactgacgaggactccgacaacgagatccacaaccccgctgtgttcacctggcccccctggcaggctggtatcctggctcgtaacctggtgcccatggtggctaccgtgcagggccagaacctgaagtaccaagagttcttctgggacgccaacgacatctaccgtatcttcgctgagctggaaggcgtgtggcagcccgctgctcagcccaagcgtcgtcgtcaccgtcaggacgctctgcctggtccctgtatcgcttccacccccaagaagcaccgcggctaaaagcttgtcgagaagtactagaggatcataatcagccataccacatttgtagaggttttacttgctttaaaaaacctcccacacctccccctgaacctgaaacataaaatgaatgcaattgttgttgttaacttgtttattgcagcttataatggttacaaataaagcaatagcatcacaaatttcacaaataaagcatttttttcactgcattctagttgtggtttgtccaaactcatcaatgtatcttatcatgtctggatctgatcactgcttgagcctagaagatccggctgctaacaaagcccgaaaggaagctgagttggctgctgccaccgctgagcaataactatcataaccggaatattaatagatcatggagataattaaaatgataaccatctcgcaaataaataagtattttactgttttcgtaacagttttgtaataaaaaaacctataaatattccggattattcataccgtcccaccatcgggcgcggatcccggtccgaagcgcgcggaattcgccaccatgaccatggacgagcagcagccccaggctgtgacccccgtgtacgtgggcggtttcctggctcgttacgaccagtcccccgacgaggctgagctgctgctgccacgtgacgtggtcgaacactggctgcacgctcagggccagggacagccttccctgtccgtggctctgcccctgaacatcaaccacgacgacaccgctgtcgtgggtcacgtggccgctatgcagtccgtgcgtgacggcctgttctgcctgggttgcgtgacctccccccgtttcctggaaatcgtgcgtcgtgcttccgagaagtccgagctggtgtcccgtggtcccgtgtccccactgcagcccgacaaggtggtcgagttcctgtccggttcctacgctggcctgtccctgtcatcccgtcgttgcgacgacgtcgaggctgctacctccctgagcggctccgagactacccccttcaagcacgtggccctgtgctccgtgggtcgtaggcgtggaaccctggctgtgtacggtcgtgaccccgagtgggtcacccagcgtttccccgacctgaccgctgctgaccgtgacggactgcgtgctcagtggcagcgttgcggttccaccgctgtggacgcttccggcgaccccttccgttccgactcctacggcctgctgggcaactccgtggacgctctgtacatccgcgagcgtctgcccaagctgcgttacgacaagcagctcgtgggtgtcaccgagcgcgagtcctacgtgaaggcttccgtgtcccccgaggctgcttgcgacatcaaggctgcttccgctgagcgttctggcgacagccgctcccaggctgctactcctgctgctggtgctcgtgtgccctccagctccccatccccacctgtcgagcctccctcccccgtgcaacctcctgctctgcctgcttccccctccgtgctgcctgctgagtccagcccctccctgtcaccctctgagcctgctgaggctgcctccatgtcccaccctctgagcgctgctgtgactgctgctaccgctccccctggtgctactgtggctggtgcttcccccgctgtgccttccctggcttggcctcacgacggtgtctacctgcccaaggacgctttcttctccctgctgggcgcttcccgttccgctgctcccgtgatgtaccccggtgctgtggctgctccccccagcgcttcacctgctcctctgcccctgccctcctaccccgcttcctacggtgctcccgtcgtgggttacgaccagctggctgctcgtcacttcgctgactacgtggacccccactaccccggctggggtcgtcgttacgagcccgctccttccctgcacccatcctaccctgtgccccctcctccatcacccgcttactaccgtcgtcgtgactcccccggtggcatggacgagcctccatctggatgggagcgttacgacggttcccaccgtggccagtcccaaaagcagcaccgtcacggtggttccggtggtcacaacaagcgtcgcaaggaagccgctgctgcatcctccagctccgacgaggacctgagcttccccggcgaggctgaacacggtcgtgctcgcaagcgtctgaagtcccacgtgaactccgacggaggtagcggaggccacgctggttccaaccagcagcagcaacagcgctacgacgagctgcgtgacgctatccacgagctgaagcgtgacctgttcgctgctcgccagtcctccaccctgctgtctgctgctctgccagctgccgcttcttcctcccctaccaccaccaccgtgtgcacccctactggcgagctgacctctggtggtggcgagactcccaccgctctgctgtccggtggtgctaaggtggccgagcgtgctcaggctggtgtcgtgaacgcttcctgccgtctggctaccgcttccggttccgaggctgccaccgctggtccctctaccgctggttcctcatcctgcccagcttccgtggtgctggctgccgctgctgctcaagccgccgctgcttcacagtcccccccaaaggatatggtggacctgaaccgtcgtatcttcgtggctgctctgaacaagctcgagtaataaaagcttgtcgagaagtactagaggatcataatcagccataccacatttgtagaggttttacttgctttaaaaaacctcccacacctccccctgaacctgaaacataaaatgaatgcaattgttgttgttaacttgtttattgcagcttataatggttacaaataaagcaatagcatcacaaatttcacaaataaagcatttttttcactgcattctagttgtggtttgtccaaactcatcaatgtatcttatcatgtctggatctgatcactgcttgagcctagaagatccggctgctaacaaagcccgaaaggaagctgggaatattaatagatcatggagataattaaaatgataaccatctcgcaaataaataagtattttactgttttcgtaacagttttgtaataaaaaaacctataaatattccggattattcataccgtcccaccatcgggcgcggatccgccaccatggctgctatggaagctaacatcttctgcaccttcgaccacaagctgtctatcgctgacgtgggcaagctgaccaagctggtggctgctgtggtgcccatcccccagcgtctgcacctgatcaagcactaccagctgggcctgcaccagttcgtggaccacacccgtggttacgtgcgtctgcgtggcctgctgcgtaacatgaccctgaccctgatgcgtcgtgtcgagggcaaccagatcctgctgcacgtgcccacccacggcctgctgtacaccgtgctgaacaccggtcccgtgacctgggagaagggcgacgctctgtgcgtgctgccccccctgttccacggtcccctggctcgtgaaaacctgttgaccctgggccagtgggagctggtgctgccctggatcgtgcccatgcccctggctctggaaatcaaccagcgcctgctgatcatgggcctgttctccctggaccgttcctacgaagaagtgaaggctgctgtccagcagctgcagaccatcaccttccgtgacgctaccttcaccatccccgaccccgtgatcgaccagcacctcctgatcgacatgaagaccgcttgcctgtccatgtccatggtggctaacctggcttccgagctgaccatgacctacgtccgcaagctggctttggaggactcttccatgctgctggtcaagtgccaagagctgctgatgcgtctggaccgcgagcgttccgtgggcgagcctcgtactcccgctcgtcctcagcacgtgtcccccgacgacgagatcgctcgtctgtccgctctgttcgtgatgctgcgtcagctggacgacctgatccgcgagcaggtcgtgttcaccgtgtgcgacgtgagcccagacaacaagtccgctacctgcatcttcaagggctaaggcgcgccaagcttgtcgagaagtactagaggatcataatcagccataccacatttgtagaggttttacttgctttaaaaaacctcccacacctccccctgaacctgaaacataaaatgaatgcaattgttgttgttaacttgtttattgcagcttataatggttacaaataaagcaatagcatcacaaatttcacaaataaagcatttttttcactgcattctagttgtggtttgtccaaactcatcaatgtatcttatcatgtctggatctgatcactgcttgagcctagaagatccggctgctaacaaagcccgaaaggaagctgagttggctgctgccaccgctgagcaataactatcataacccctaggagatccgaaccagataagtgaaatctagttccaaactattttgtcatttttaattttcgtattagcttacgacgctacacccagttcccatctattttgtcactcttccctaaataatccttaaaaactccatttccacccctcccagttcccaactattttgtccgcccaca

SEQ ID NO: 49 - DNA, 27364 bp, Artificial Sequence
  Synthetic construct
ttgttccagtttggaacaagagtccactattaaagaacgtggactccaacgtcaaagggcgaaaaaccgtctatcagggcgatggcccactacgtgaaccatcaccctaatcaagttttttggggtcgaggtgccgtaaagcactaaatcggaaccctaaagggagcccccgatttagagcttgacggggaaagccggcgaacgtggcgagaaaggaagggaagaaagcgaaaggagcgggcgctagggcgctggcaagtgtagcggtcacgctgcgcgtaaccaccacacccgccgcgcttaatgcgccgctacagggcgcgtccattcgccattcaggctgcgcaactgttgggaagggcgatcggtgcgggcctcttcgctattacgccagctggcgaaagggggatgtgctgcaaggcgattaagttgggtaacgccagggttttcccagtcacgacgttgtaaaacgacggccagtgcatagaccagccgcgtaacctggcaaaatcggttacggttgagtaataaatggatgccctgcgtaagcgggtgtgggcggacaataaagtcttaaactgaacaaaatagatctaaactatgacaataaagtcttaaactagacagaatagttgtaaactgaaatcagtccagttatgctgtgaaaaagcatactggacttttgttatggctaaagcaaactcttcattttctgaagtgcaaattgcccgtcgtattaaagaggggcgtggccaagggcatggtaaagactatattcgcggcgttgtgacaatttaccgaacaactccgcggccgggaagccgatctcggcttgaacgaattgttaggtggcggtacttgggtcgatatcaaagtgcatcacttcttcccgtatgcccaactttgtatagagagccactgcgggatcgtcaccgtaatctgcttgcacgtagatcacataagcaccaagcgcgttggcctcatgcttgaggagattgatgagcgcggtggcaatgccctgcctccggtgctcgccggagactgcgagatcatagatatagatctcactacgcggctgctcaaacttgggcagaacgtaagccgcgagagcgccaacaaccgcttcttggtcgaaggcagcaagcgcgatgaatgtcttactacggagcaagttcccgaggtaatcggagtccggctgatgttgggagtaggtggctacgtctccgaactcacgaccgaaaagatcaagagcagcccgcatggatttgacttggtcagggccgagcctacatgtgcgaatgatgcccatacttgagccacctaactttgttttagggcgactgccctgctgcgtaacatcgttgctgctgcgtaacatcgttgctgctccataacatcaaacatcgacccacggcgtaacgcgcttgctgcttggatgcccgaggcatagactgtacaaaaaaacagtcataacaagccatgaaaaccgccactgcgccgttaccaccgctgcgttcggtcaaggttctggaccagttgcgtgagcgcatacgctacttgcattacagtttacgaaccgaacaggcttatgtcaactgggtttgtgccttcatccgtttccacggtgtgcgtcacccggcaaccttgggcagcagcgaagtcgaggcatttctgtcctggctggcgaacgagcgcaaggtttcggtctccacgcatcgtcaggcattggcggccttgctgttcttctacggcaaggtgctgtgcacggatctgcccttgcttcaggagatcggtagacctcggccgtcgcggcgcttgccggtggtgctgaccccggatgaagtggttcgcatcctcggttttctggaaggcgagcatcgtttgttcgcccaggactctagctatagttctagtggttggctacagctttgtttgtactatcaacaggttgaactgctgatcaacagatcctctacgcggccgcggtaccataacttcgtatagcatacattatacgaagttatctggtttaaacgtacccgtagtggctatggcagggcttgccgccccgacgttggctgcgagccctgggccttcacccgaacttgggggttggggtggggaaaaggaagaaacgcgggcgtattggtcccaatggggtctcggtggggtatcgacagagtgccagccctgggaccgaaccccgcgtttatgaacaaacgacccaacacccgtgcgttttattctgtctttttattgccgtcatagcgcgggttccttccggtattgtctccttccgtgtttcagttagcctcccccatctcccggtaccgcatgctatgcatcagctgctagcttactgcagccaccaccacagggagttcagggtggacaggttcacagcacgacggtgctcagggggggtcaggttgccgtaggtggaggactgcaggctgaagttacggatctcagacaggaacagcagggagtccaggtagtcccacatggggtcgatgaaggtgcgctggaaacgggtggatggggaggtgggggtggtcttgttgttgtcggaagcagtctcgttctcgacgggcatggtgtcgttgtagtacagggaggacatgtccagggtgccgtagatggtgtagggagtctcgttacggatcagcacgtgagtgttcttcatgaactcggacacagcggtacggttacggttgggcttgcagaagggctcgtcacggtaacgcagggtggtgtacacccaggtagccaggtccttcagctgagtggtcaggatagacttcatgaagttctcgtcgggacggtaaccgatggtagaggtggggatacgggtgggcacgatgggggagtaggtcacgttggtggaaacgttgaagatggtggaggtgtaggaggagtagggggtagtagtgctgacgcgggacttcttggagatggacttcacgggagcctgcttgcgcttcagcttgcgcatggtgttcttcagcttggtggagttgatgtacttgggcacacggaagatgttacgggacatagcgttgaccaggtagaaggaacgggtgcagttgcgctgagcgtaacgcagcagcagagcagccaggcccaggaagtagatagtctgggagtccacgttgaccttggaggggcccacgtacagcttggtgttccaacggggcacgttgaagaacatggggttgaaggtggtgaagttgccgcagttttcctcgccggtgttgttacgacgggacacgttcagcatctcggacaggcaggtcatggaggggatggtgccgcaagaggggggacggaaggtgatcttctggccggtgtggttgtactcggagtacacgtacttagcgggcttgcgcagctgggtggtgtggaagtcgaaccacaggtgggtgatggagtggttacggatgggaccagccaggatggagttgggggggaactgcttcatctcgacggtgatgttgtacagcttctgctggctggggaaggtgaagaacttgtagtagtcgccggtcttggaagccagctcttgcaggatacgcagcttcagctggcgttcctcttccttagccttctgggacttcacacggaaacgagccacagcgatcttgcagttgatgaagctgaacagcaggaaggtcagggacatcaggaagaacaggttgaacacgccacgcatctcgcccttgcgacccatggtggcctcgagatcccgggtgatcaagtcttcgtcgagtgattgtaaataaaatgtaatttacagtatagtattttaattaatatacaaatgatttgataataattcttatttaactataatatattgtgttgggttgaattaaaggtccgtatactagtatcgattcgcgacctactccggaatattaatagatcatggagataattaaaatgataaccatctcgcaaataaataagtattttactgttttcgtaacagttttgtaataaaaaaacctataaatattccggattattcataccgtcccaccatcgggcgcggatccgccaccatggaaaactggtccgctctggaactgctgcccaaggtcggaatccctaccgacttcctgacccacgtcaagacctccgctggcgaggaaatgttcgaggctctgaggatctactacggcgacgaccccgagcgttacaacatccacttcgaggctatcttcggcaccttctgcaaccgtctggaatgggtgtacttcctgacttccggcctggctgctgctgctcacgctatcaagttccacgacctgaacaagctgaccaccggcaagatgctgttccacgtgcaagtgccccgtgtggcttccggtgctggcctgcctacctcccgtcagaccaccatcatggtcaccaagtactccgagaagtcccccatcaccatccctttcgagctgtccgctgcttgcctgacttacctgcgtgaaaccttcgagggcaccatcctggacaagatcctgaacgtcgaggctatgcacaccgtgctgcgtgctctgaagaacaccgctgacgctatggaacgtggcctgatccacagcttcctccagaccctgctgaggaaggctcccccctacttcgtggtgcagaccctggtcgagaacgctaccctggctcgtcaggctctgaaccgtatccagcgctccaacatcctgcagtccttcaaggctaagatgctggctaccctgttcctgctgaaccgtacccgtgaccgtgactacgtgctgaagttcctgacccgtctggctgaggctgctaccgactccatcctcgacaaccctactacctacaccacctcctccggtgctaagatctccggtgtcatggtgtccaccgctaacgtgatgcagatcatcatgtccctgctgtcctcccacatcactaaggaaaccgtgtccgctcccgctacctacggcaacttcgtgctgtcccccgagaacgctgtgaccgctatctcctaccactctatcctggctgacttcaactcctacaaggctcacctgacctccggccagccccacctccccaacgactccctgagccaggctggtgctcactccctgacccccctgtccatggacgtgatccgtctgggcgaaaagaccgtgatcatggaaaacctgcgtcgcgtgtacaagaacaccgacaccaaggaccccctggaacgtaacgtggacctgaccttcttcttccccgtgggcctgtacctgcccgaggaccgtggttacaccaccgtcgagtccaaggtcaagctgaacgacaccgtgcgtaacgctctgcccaccaccgcttacctgctgaacagggaccgtgctgtgcaaaagatcgacttcgtggacgctctcaagaccctgtgccaccccgtgctgcacgagcctgctccatgcctgcaggctttcaccgagcgtggtcccccatccgagcccgctatgcagcgtctgctggaatgccgtttccagcaagagcccatgggtggtgctgctcgtcgtatcccccacttctaccgtgtgcgccgcgaggtgccccgtaccgtgaacgagatgaagcaggacttcgtggtcaccgacttctacaaggttggaaacatcaccctgtacaccgagctgcaccctttcttcgacttcacccactgccaagagaactccgagactgtggctctgtgcaccccccgtatcgtgatcggcaacctgcccgacggcctggctcccggtcccttccacgagctgaggacctgggagatcatggaacacatgcgcctgcgtcccccacccgactacgaggaaaccctgcgtctgttcaagaccaccgtgacctcccccaactaccccgagctgtgctacctggtggacgtgctggtgcacggcaacgctgacgctttcctgctgatccgcgctttcatcgctcgttgcatcgtgaacatgttccacacccgtcagctgctggtgttcgctcactcctacgctctggtcaccctgatcgctgagcacctggctgacggtgctctgcccccccagctcctgttccactaccgtaacctggtggctgtgctgcgcctggtcacccgtatctccgctctgcccggcctgaacaacggccagctggctgaggaacccctgtccgcttacgtgaacgctctgcacgaccacaggctgtggccccccttcgtgacccacctccctcgtaacatggaaggtgtccaggtggtggctgatcgtcagcccctgaaccccgctaacatcgaggctcgtcaccacggtgtctccgacgtgccccgtctgggtgctatggacgctgacgagcccctgttcgtggacgactaccgtgctaccgacgacgagtggaccctgcaaaaggtgttctacctgtgcctgatccccgctatgaccaacaaccgtgcttgcggcctgggcctgaacctcaagactctgctggtggacctgttctaccgtcccgccttcctgctcatgcccgctgctaccgctgtgtccacctccggcaccacctccaaggaatccacctctggtgtcacccccgaggactccgtggctgctcagcgtcaggctgtgggcgagatgctgaccgagctggtcgaggacgtggccaccgacgctcacacccctctgctgcaggcttgccgcgagctgttcctggctgtgcagttcgtgggcgagcacgtgaaggtgctggaagtgcgtgctcccctggaccacgctcagaggcagggactgcccgacttcatctcccgtcagcatgtgctgtacaacggttgctgcgtcgtgaccgctcctaagaccctgatcgagtactccctgcccgtgcccttccaccgtttctactccaaccccaccatctgcgctgctctgtccgacgacatcaagcgttacgtgaccgagttcccccactaccatagacacgatggtggtttccccctgcccaccgctttcgctcacgagtaccacaactggctgcgtagccccttctcccgttactccgctacctgccccaacgtgctgcactccgtgatgaccctggctgctatgctgtacaagatctcccccgtgtccctggtgctgcagaccaaggctcacatccaccccggtttcgctctgaccgctgtgcgtaccgacaccttcgaggtggacatgctgctgtactccggcaagtcctgcacctccgtcatcatcaacaaccccatcgtgaccaaggaagagagggacatctccaccacctaccacgtgacccagaacatcaacaccgtggacatgggcctgggttacacctccaacacttgcgtggcctacgtgaaccgcgtccgcaccgacatgggtgtccgtgtgcaggacctgttccgtgtgttccccatgaacgtgtaccgccacgatgaggtggaccgttggatcaggcacgctgctggcgtcgagcgtccccagctgctggacaccgagactatctccatgctgaccttcggttccatgtccgagcgcaacgctgctgctaccgtgcacggccagaaggctgtctgcgagctgatcctgacccctgtgactatggacgtgaactacttcaagatcaccaacaaccctcgtggtcgtgcttcctgcatgctgggcgtggacccctacgacaccgaggctgccaccaaggctatctacgaccaccgcgaggctgacgctcagaccttcgctgctacccacaacccatgggcttcccaggctggttgcctgtccgacgtcctgtacaacacccgtcaccgcgagcgtctgggctacaactccaagttctactccccctgcgctcagtacttcaacaccgaggaaatcatcgctgccaacaagaccctcttcaagaccatcgacgagtacctgctgcgcgctaaggactgcatccgtggcgacaccgacactcagtacgtgtgcgtcgagggaaccgagcagctgatcgagaacccttgccgtctgacccaagaggctctgcccatcctgtccaccaccaccctggctctgatggaaactaagctgaagggtggcgctggtgctttcgctacctccgagactcacttcggcaactacgtcgtgggagagatcatccccctgcagcagtccatgctgttcaacagctaagagctcaagcttgtcgagaagtactagaggatcataatcagccataccacatttgtagaggttttacttgctttaaaaaacctcccacacctccccctgaacctgaaacataaaatgaatgcaattgttgttgttaacttgtttattgcagcttataatggttacaaataaagcaatagcatcacaaatttcacaaataaagcatttttttcactgcattctagttgtggtttgtccaaactcatcaatgtatcttatcatgtctggatctgatcactgcttgagcctagaagatccggctgctaacaaagcccgaaaggaagctgagttggctgctgtggctagctttgtttaactttaagaaggagatacatctagaccggaatattaatagatcatggagataattaaaatgataaccatctcgcaaataaataagtattttactgttttcgtaacagttttgtaataaaaaaacctataaatattccggattattcataccgtcccaccatcgggcgcggatcccggtccgaagcgcgcggaattcaaaggcctacgtcgacgccaccatggaatcccgtggtcgtcgttgccccgagatgatctccgtgctgggtcccatctccggtcacgtcctgaaggctgtgttctcccgtggcgacacccccgtgctgccccacgaaactcgtctgctgcagaccggtatccacgtgcgtgtgtcccagccctccctgatcctggtgtcccagtacacccccgactccaccccttgccaccgcggagacaaccagctgcaggtccagcacacctacttcaccggttccgaggtcgagaacgtgtccgtgaacgtgcacaaccccaccggtcgttccatctgcccctcccaagagcccatgtccatctacgtgtacgctctgcccctgaagatgctgaacatcccctccatcaacgtgcaccactacccctccgctgctgagcgcaagcaccgtcacctccccgtggctgacgctgtgatccacgcttccggcaagcagatgtggcaggctcgtctgaccgtgtccggcctggcttggacccgtcagcagaaccagtggaaggaacccgacgtgtactacacctccgctttcgtgttccccaccaaggacgtggccctgcgtcacgtcgtgtgcgctcacgaactcgtgtgctccatggaaaacacccgtgctaccaagatgcaagtgatcggcgaccagtacgtgaaggtgtacctggaatccttctgcgaggacgtgccctccggcaagctgttcatgcacgtgaccctgggttccgacgtggaagaggacctgaccatgacccgtaacccccagcccttcatgcgtccccacgagcgtaacggtttcaccgtgctgtgccccaagaacatgatcatcaagcccggcaagatctcccacatcatgctggacgtggccttcacctcccacgagcacttcggcctgctgtgccctaagtccatccccggcctgtccatctccggcaacctgctgatgaacggccagcagatcttcctggaagtgcaggctatccgtgaaaccgtcgagctgcgtcagtacgaccctgtggctgctctgttcttcttcgacatcgacctgctgctgcagcgtggtccccagtactccgagcaccccaccttcaccagccagtaccgtatccagggcaagctggaataccgtcacacctgggaccgtcacgacgagggtgctgctcagggcgacgacgacgtgtggacctccggttccgactccgacgaggaactggtcaccaccgagcgcaagaccccccgtgtgaccggtggtggtgctatggctggtgcttccacctccgctggtcgcaagcgcaagtccgcttcctccgctaccgcttgcaccgctggtgtcatgacccgtggtcgcctgaaggctgagtccaccgtggctcccgaagaggacactgacgaggactccgacaacgagatccacaaccccgctgtgttcacctggcccccctggcaggctggtatcctggctcgtaacctggtgcccatggtggctaccgtgcagggccagaacctgaagtaccaagagttcttctgggacgccaacgacatctaccgtatcttcgctgagctggaaggcgtgtggcagcccgctgctcagcccaagcgtcgtcgtcaccgtcaggacgctctgcctggtccctgtatcgcttccacccccaagaagcaccgcggctaaaagcttgtcgagaagtactagaggatcataatcagccataccacatttgtagaggttttacttgctttaaaaaacctcccacacctccccctgaacctgaaacataaaatgaatgcaattgttgttgttaacttgtttattgcagcttataatggttacaaataaagcaatagcatcacaaatttcacaaataaagcatttttttcactgcattctagttgtggtttgtccaaactcatcaatgtatcttatcatgtctggatctgatcactgcttgagcctagaagatccggctgctaacaaagcccgaaaggaagctgagttggctgctgccaccgctgagcaataactatcataaccggaatattaatagatcatggagataattaaaatgataaccatctcgcaaataaataagtattttactgttttcgtaacagttttgtaataaaaaaacctataaatattccggattattcataccgtcccaccatcgggcgcggatcccggtccgaagcgcgcggaattcgccaccatgaccatggacgagcagcagccccaggctgtgacccccgtgtacgtgggcggtttcctggctcgttacgaccagtcccccgacgaggctgagctgctgctgccacgtgacgtggtcgaacactggctgcacgctcagggccagggacagccttccctgtccgtggctctgcccctgaacatcaaccacgacgacaccgctgtcgtgggtcacgtggccgctatgcagtccgtgcgtgacggcctgttctgcctgggttgcgtgacctccccccgtttcctggaaatcgtgcgtcgtgcttccgagaagtccgagctggtgtcccgtggtcccgtgtccccactgcagcccgacaaggtggtcgagttcctgtccggttcctacgctggcctgtccctgtcatcccgtcgttgcgacgacgtcgaggctgctacctccctgagcggctccgagactacccccttcaagcacgtggccctgtgctccgtgggtcgtaggcgtggaaccctggctgtgtacggtcgtgaccccgagtgggtcacccagcgtttccccgacctgaccgctgctgaccgtgacggactgcgtgctcagtggcagcgttgcggttccaccgctgtggacgcttccggcgaccccttccgttccgactcctacggcctgctgggcaactccgtggacgctctgtacatccgcgagcgtctgcccaagctgcgttacgacaagcagctcgtgggtgtcaccgagcgcgagtcctacgtgaaggcttccgtgtcccccgaggctgcttgcgacatcaaggctgcttccgctgagcgttctggcgacagccgctcccaggctgctactcctgctgctggtgctcgtgtgccctccagctccccatccccacctgtcgagcctccctcccccgtgcaacctcctgctctgcctgcttccccctccgtgctgcctgctgagtccagcccctccctgtcaccctctgagcctgctgaggctgcctccatgtcccaccctctgagcgctgctgtgactgctgctaccgctccccctggtgctactgtggctggtgcttcccccgctgtgccttccctggcttggcctcacgacggtgtctacctgcccaaggacgctttcttctccctgctgggcgcttcccgttccgctgctcccgtgatgtaccccggtgctgtggctgctccccccagcgcttcacctgctcctctgcccctgccctcctaccccgcttcctacggtgctcccgtcgtgggttacgaccagctggctgctcgtcacttcgctgactacgtggacccccactaccccggctggggtcgtcgttacgagcccgctccttccctgcacccatcctaccctgtgccccctcctccatcacccgcttactaccgtcgtcgtgactcccccggtggcatggacgagcctccatctggatgggagcgttacgacggttcccaccgtggccagtcccaaaagcagcaccgtcacggtggttccggtggtcacaacaagcgtcgcaaggaagccgctgctgcatcctccagctccgacgaggacctgagcttccccggcgaggctgaacacggtcgtgctcgcaagcgtctgaagtcccacgtgaactccgacggaggtagcggaggccacgctggttccaaccagcagcagcaacagcgctacgacgagctgcgtgacgctatccacgagctgaagcgtgacctgttcgctgctcgccagtcctccaccctgctgtctgctgctctgccagctgccgcttcttcctcccctaccaccaccaccgtgtgcacccctactggcgagctgacctctggtggtggcgagactcccaccgctctgctgtccggtggtgctaaggtggccgagcgtgctcaggctggtgtcgtgaacgcttcctgccgtctggctaccgcttccggttccgaggctgccaccgctggtccctctaccgctggttcctcatcctgcccagcttccgtggtgctggctgccgctgctgctcaagccgccgctgcttcacagtcccccccaaaggatatggtggacctgaaccgtcgtatcttcgtggctgctctgaacaagctcgagtaataaaagcttgtcgagaagtactagaggatcataatcagccataccacatttgtagaggttttacttgctttaaaaaacctcccacacctccccctgaacctgaaacataaaatgaatgcaattgttgttgttaacttgtttattgcagcttataatggttacaaataaagcaatagcatcacaaatttcacaaataaagcatttttttcactgcattctagttgtggtttgtccaaactcatcaatgtatcttatcatgtctggatctgatcactgcttgagcctagaagatccggctgctaacaaagcccgaaaggaagctgggaatattaatagatcatggagataattaaaatgataaccatctcgcaaataaataagtattttactgttttcgtaacagttttgtaataaaaaaacctataaatattccggattattcataccgtcccaccatcgggcgcggatccgccaccatggctgctatggaagctaacatcttctgcaccttcgaccacaagctgtctatcgctgacgtgggcaagctgaccaagctggtggctgctgtggtgcccatcccccagcgtctgcacctgatcaagcactaccagctgggcctgcaccagttcgtggaccacacccgtggttacgtgcgtctgcgtggcctgctgcgtaacatgaccctgaccctgatgcgtcgtgtcgagggcaaccagatcctgctgcacgtgcccacccacggcctgctgtacaccgtgctgaacaccggtcccgtgacctgggagaagggcgacgctctgtgcgtgctgccccccctgttccacggtcccctggctcgtgaaaacctgttgaccctgggccagtgggagctggtgctgccctggatcgtgcccatgcccctggctctggaaatcaaccagcgcctgctgatcatgggcctgttctccctggaccgttcctacgaagaagtgaaggctgctgtccagcagctgcagaccatcaccttccgtgacgctaccttcaccatccccgaccccgtgatcgaccagcacctcctgatcgacatgaagaccgcttgcctgtccatgtccatggtggctaacctggcttccgagctgaccatgacctacgtccgcaagctggctttggaggactcttccatgctgctggtcaagtgccaagagctgctgatgcgtctggaccgcgagcgttccgtgggcgagcctcgtactcccgctcgtcctcagcacgtgtcccccgacgacgagatcgctcgtctgtccgctctgttcgtgatgctgcgtcagctggacgacctgatccgcgagcaggtcgtgttcaccgtgtgcgacgtgagcccagacaacaagtccgctacctgcatcttcaagggctaaggcgcgccaagcttgtcgagaagtactagaggatcataatcagccataccacatttgtagaggttttacttgctttaaaaaacctcccacacctccccctgaacctgaaacataaaatgaatgcaattgttgttgttaacttgtttattgcagcttataatggttacaaataaagcaatagcatcacaaatttcacaaataaagcatttttttcactgcattctagttgtggtttgtccaaactcatcaatgtatcttatcatgtctggatctgatcactgcttgagcctagaagatccggctgctaacaaagcccgaaaggaagctgagttggctgctgccaccgctgagcaataactatcataacccctaggggcctctaaacgggtcttgaggggttttttgctgaaaggaggaactatatccggatctgaacaggagggacagctgatagaaacagaagccactggagcacctcaaaaacaccatcatacactaaatcagtaagttggcagcatcacccgacgcactttgcgccgaataaatacctgtgacggaagatcacttcgcagaataaataaatcctggtgtccctgttgataccgggaagccctgggccaacttttggcgaaaatgagacgttgatcggcacgtaagaggttccaactttcaccataatgaaataagatcactaccgggcgtattttttgagttatcgagattttcaggagctaaggaagctaaaatggagaaaaaaatcactggatataccaccgttgatatatcccaatggcatcgtaaagaacattttgaggcatttcagtcagttgctcaatgtacctataaccagaccgttcagctggatattacggcctttttaaagaccgtaaagaaaaataagcacaagttttatccggcctttattcacattcttgcccgcctgatgaatgctcatccggaattccgtatggcaatgaaagacggtgagctggtgatatgggatagtgttcacccttgttacaccgttttccatgagcaaactgaaacgttttcatcgctctggagtgaataccacgacgatttccggcagtttctacacatatattcgcaagatgtggcgtgttacggtgaaaacctggcctatttccctaaagggtttattgagaatatgtttttcgtctcagccaatccctgggtgagtttcaccagttttgatttaaacgtggccaatatggacaacttcttcgcccccgttttcaccatgggcaaatattatacgcaaggcgacaaggtgctgatgccgctggcgattcaggttcatcatgccgtttgtgatggcttccatgtcggcagaatgcttaatgaattacaacagtactgcgatgagtggcagggcggggcgtaatttttttaaggcagttattggtgcccttaaacgcctggttgctacgcctgaataagtgataataagcggatgaatggcagaaattcgaaagcaaattcgacccggtcgtcggttcagggcagggtcgttaaatagccgcttatgtctattgctggtttaccggtttattgactaccggaagcagtgtgaccgtgtgcttctcaaatgcctgaggccagtttgctcaggctctccccgtggaggtaataattgacgatatgatcatttattctgcctcccagctgacattcatccggggtcagcaccgtttctgcggactggctttctacgtgttccgcttcctttagcagcccttgcgccctgagtgcttgcggcagcgtgaagctaattctgtcagccgttaagtgttcctgtgtcactcaaaattgctttgagaggctctaagggcttctcagtgcgttacatccctggcttgttgtccacaaccgttaaaccttaaaagctttaaaagccttatatattcttttttttcttataaaacttaaaaccttagaggctatttaagttgctgatttatattaattttattgttcaaacatgagagcttagtacgtgaaacatgagagcttagtacgttagccatgagagcttagtacgttagccatgagggtttagttcgttaaacatgagagcttagtacgttaaacatgagagcttagtacgtgaaacatgagagcttagtacgtactatcaacaggttgaactgctgatcaacagatcctctacgcggccgcggtaccataacttcgtatagcatacattatacgaagttatctggtttaaacgtacccgtagtggctatggcagggcttgccgccccgacgttggctgcgagccctgggccttcacccgaacttgggggttggggtggggaaaaggaagaaacgcgggcgtattggtcccaatggggtctcggtggggtatcgacagagtgccagccctgggaccgaaccccgcgtttatgaacaaacgacccaacacccgtgcgttttattctgtctttttattgccgtcatagcgcgggttccttccggtattgtctccttccgtgtttcagttagcctcccccatctcccggtaccgcatgctatgcatcagctgctagcttagcgagcgtccacagcctggggaccgtaacgggagtgagcgggcaggttcacacgggtctgcttcagctcagggggcaggccagcgtagtacttgtccaggtgacgcagcaggggggggtccagctggtgacgcaggcagaattccttcacagcgttgtacaggccgtagaacagggtgataccctcgggagcagcagcggtggacacgggcagacgcacagcacggttggtacgggtagcctcgttacggatagccaccaccacgttgaacagggaggggggcaccagctcgaaacccagcacgtgttcggtgaagatggaacgaccgtaggacagacgagtcaggtcgtaaccacggcacaggtcgtccacgcaagtgtacacagcgggggaaccgtcgccgcactcggagtaaccgcgcatcacggtcatccaacggggagcggtgtcggaggacagcagggtcagcagagcacgcagctggtcggggttgttgtacagcagggccagggtgtccaggaaagcgtcgtccagcagcacggagttagcagcctcgggggtcacgggacggtaacggatcagctgggacaggggaccgtccctacgggtcacgttgaccaggggacgcagccaggactcgtacttgtcgccctggaacacctctcccagcaggcaacgacgggtcagctcggggcactcagcgggcaccttctcagccacggtgggagccacggacacggtagcggaggacacgatgggcagcagcaggcagcaccacagcagagccacgggaccgggggagaaggagaaaccgcagtcgggacgacggcacatggtggctcgagatcccgggtgatcaagtcttcgtcgagtgattgtaaataaaatgtaatttacagtatagtattttaattaatatacaaatgatttgataataattcttatttaactataatatattgtgttgggttgaattaaaggtccgtatactagtatcgattcgcgacctactccggaatattaatagatcatggagataattaaaatgataaccatctcgcaaataaataagtattttactgttttcgtaacagttttgtaataaaaaaacctataaatattccggattattcataccgtcccaccatcgggcgcggatccgccaccatgtcccccaagaacctgacccccttcctgaccgctctgtggctgctgctgggccactcccgtgtgcctcgtgtgcgtgctgaggaatgctgcgagttcatcaacgtgaaccacccccccgagcgctgctacgacttcaagatgtgcaaccgtttcaccgtggctctgcgttgccccgacggcgaagtgtgctactcccccgaaaagaccgctgagatccgtggtatcgtgaccaccatgacccactccctgacccgtcaggtggtgcacaacaagctgacctcttgcaactacaaccccctgtacctcgaggctgacggtcgtatccgttgcggcaaggtcaacgacaaggctcagtacctgctgggtgctgctggttccgtgccctaccgttggatcaacctcgagtacgacaagatcacccgtatcgtgggcctggaccagtacctcgagtccgtgaagaagcacaagcgtctggacgtgtgccgtgctaagatgggttacatgctgcagtaaaagcttgtcgagaagtactagaggatcataatcagccataccacatttgtagaggttttacttgctttaaaaaacctcccacacctccccctgaacctgaaacataaaatgaatgcaattgttgttgttaacttgtttattgcagcttataatggttacaaataaagcaatagcatcacaaatttcacaaataaagcatttttttcactgcattctagttgtggtttgtccaaactcatcaatgtatcttatcatgtctggatctgatcactgcttgagcctagaagatccggctgctaacaaagcccgaaaggaagctgagttggctgctgtggctagctttgtttaactttaagaaggagatacatctagaccggaatattaatagatcatggagataattaaaatgataaccatctcgcaaataaataagtattttactgttttcgtaacagttttgtaataaaaaaacctataaatattccggattattcataccgtcccaccatcgggcgcggatccgccaccatgctgcgtctgctgctgcgtcaccacttccactgcctgctgctgtgcgctgtgtgggctaccccctgcctggcttccccttggtccaccctgaccgctaaccagaacccctccccaccctggtccaagctgacctactccaagccccacgacgctgctaccttctactgccccttcctgtacccatccccccctcgttccccactgcagttctccggtttccagcgtgtgctgaccggtcccgagtgccgtaacgagactctgtacctgctgtacaaccgcgagggccagaccctggtcgagaggtcctccacctgggtcaagaaggtcatctggtacttgtccggtcgtaaccagaccatcctgcagcgtatgccccgtaccgcttccaagccctccgacggcaacgtgcagatctccgtcgaggacgctaagatcttcggtgctcacatggtgcccaagcagaccaagctgctgcgtttcgtggtcaacgacggcacccgttaccagatgtgcgtgatgaagctcgagtcctgggctcacgtgttccgtgactactccgtgtccttccaagtgcgcctgaccttcaccgaggctaacaaccagacctacaccttctgcacccaccccaacctgatcgtgtaaaagcttgtcgagaagtactagaggatcataatcagccataccacatttgtagaggttttacttgctttaaaaaacctcccacacctccccctgaacctgaaacataaaatgaatgcaattgttgttgttaacttgtttattgcagcttataatggttacaaataaagcaatagcatcacaaatttcacaaataaagcatttttttcactgcattctagttgtggtttgtccaaactcatcaatgtatcttatcatgtctggatctgatcactgcttgagcctagaagatccggctgctaacaaagcccgaaaggaagctgagttggctgctgggtgcctaatgagtgagctaactcacattaattgcccggaatattaatagatcatggagataattaaaatgataaccatctcgcaaataaataagtattttactgttttcgtaacagttttgtaataaaaaaacctataaatattccggattattcataccgtcccaccatcgggcgcggatccgccaccatgcgtctgtgccgtgtgtggctgtccgtgtgcctgtgcgctgtggtgctgggccagtgccagcgtgaaaccgctgagaagaacgactactaccgtgtgccccactactgggacgcttgctcccgtgctctgcccgaccagacccgttacaagtacgtcgagcagctggtggacctgaccctgaactaccactacgacgcttcccacggcctggacaacttcgacgtgctgaagcgtatcaacgtgaccgaggtgtccctgctgatctccgacttccgtcgtcagaaccgtcgtggtggcaccaacaagcgtaccaccttcaacgctgctggttccctggctccccacgctcgttccctcgagttctccgtgcgtctgttcgctaactaaaagcttgtcgagaagtactagaggatcataatcagccataccacatttgtagaggttttacttgctttaaaaaacctcccacacctccccctgaacctgaaacataaaatgaatgcaattgttgttgttaacttgtttattgcagcttataatggttacaaataaagcaatagcatcacaaatttcacaaataaagcatttttttcactgcattctagttgtggtttgtccaaactcatcaatgtatcttatcatgtctggatctgatcactgcttgagcctagaagatccggctgctaacaaagcccgaaaggaagctgagttggctgctgccaccgctgagcaataactatcataacccccggaatattaatagatcatggagataattaaaatgataaccatctcgcaaataaataagtattttactgttttcgtaacagttttgtaataaaaaaacctataaatattccggattattcataccgtcccaccatcgggcgcggatcccggtccgaagcgcgcggaattcaaaggcctaccgtcgacgccaccatggaatcccgtatctggtgcctggtcgtgtgcgtgaacctgtgcatcgtgtgcctgggtgctgctgtgtcctcctcctccacccgtggcacctccgctacccactcccaccactcctcccacaccacctccgccgctcactcccgttccggttccgtgtcccagcgtgtgacctcctcccagaccgtgtcccacggtgtcaacgagactatctacaacaccaccctgaagtacggcgacgtcgtgggtgtcaacaccaccaagtacccctaccgtgtgtgctccatggctcagggcaccgacctgatccgtttcgagcgtaacatcgtgtgcacctccatgaagcccatcaacgaggacctggacgagggtatcatggtggtgtacaagcgcaacatcgtggctcacaccttcaaggtccgcgtgtaccagaaggtgctgaccttccgtcgttcctacgcttacatccacaccacttacctgctgggttccaacaccgagtacgtggcccctcccatgtgggagatccaccacatcaactcccactcccagtgctactcctcttactcccgtgtgatcgctggcaccgtgttcgtggcttaccaccgtgactcctacgagaacaagaccatgcagctgatgcccgacgactactccaacacccactccacccgttacgtgaccgtgaaggaccagtggcactcccgtggttccacctggctgtaccgtgaaacctgcaacctgaactgcatggtcaccatcaccaccgctcgttccaagtacccttaccacttcttcgctacctccaccggcgacgtggtggacatctcccccttctacaacggtactaaccgtaacgcttcctacttcggcgagaacgctgacaagttcttcatcttccccaactacaccatcgtgtccgacttcggtcgtcccaactccgctctggaaacccaccgtctggtggctttcttggagcgtgctgactccgtgatctcctgggacatccaggacgagaagaacgtgacctgccagctgaccttctgggaggcttccgagcgtaccatccgttccgaggctgaggactcctaccacttctccagcgctaagatgaccgctaccttcctgtccaagaaacaagaggtcaacatgtccgactccgccctggactgcgtgcgtgacgaggctatcaacaagctgcagcagatcttcaacacctcctacaaccagacctacgagaagtacggaaacgtgtccgtgttcgagactaccggtggcctggtggtgttctggcagggtatcaagcagaagtccctggtcgagctggaacgtctggctaaccgttcctccctgaacctgacccacaaccgtaccaagcgttccaccgacggcaacaacgctactcacctgtccaacatggaatccgtgcacaacctggtgtacgctcagctgcagttcacctacgacaccctgcgcggttacatcaaccgtgctctggctcagatcgctgaggcttggtgcgtggaccagcgtcgtaccctggaagtgttcaaggaactgtccaagatcaacccctccgctatcctgtccgccatctacaacaagcctatcgctgctcgtttcatgggcgacgtgctgggcctggcttcctgcgtgaccatcaaccagacttccgtgaaggtgctgcgtgacatgaacgtgaaggaatcccccggtcgttgctactcccgtcccgtggtcatcttcaacttcgctaactcctcctacgtgcagtacggccagctgggcgaggacaacgagatcctgctgggcaaccaccgtaccgaggaatgccagctgccctccctgaagatcttcatcgctggcaactccgcttacgaatacgtggactacctgttcaagcgcatgatcgacctgtcctccatctctaccgtggactccatgatcgctctggacatcgaccccctggaaaacaccgacttccgtgtgctggaactgtactcccagaaggaactgcgttccatcaacgtgttcgacctggaagagatcatgcgcgagttcaactcctacaagcagcgtgttaagtacgtcgaggacaaggtggtggaccccctgcccccctacctgaagggactggacgacctgatgtccggcctgggagctgccggcaaggctgtgggtgtcgctatcggtgctgtgggtggtgctgtggcttccgtggtcgagggtgtcgccaccttcctgaagaaccccttcggtgctttcaccatcatcctggtggctatcgctgtggtcatcatcatctacctgatctacacccgtcagcgtcgtctgtgcatgcagcccctgcagaacctgttcccctacctggtgtccgctgacggtactaccgtgacctccggcaacaccaaggacacctccctgcaggctcccccatcctacgaggaatccgtctacaactccggtcgcaagggtcccggtcccccttcctccgacgcttctaccgctgctcccccatacaccaacgagcaggcttaccagatgctgctggctctcgtgcgtctggacgctgagcagcgtgcacagcagaacggcaccgactccctggacggccagaccggaacccaggacaagggccagaagcccaacctgctggaccgtctgcgtcaccgcaagaacggttaccgtcacctgaaggactccgacgaggaagagaacgtctaaggcgcgccaagcttgtcgagaagtactagagatcataatcagccataccacatttgtagaggttttacttgctttaaaaaacctcccacacctccccctgaacctgaaacataaaatgaatgcaattgttgttgttaacttgtttattgcagcttataatggttacaaataaagcaatagcatcacaaatttcacaaataaagcatttttttcactgcattctagttgtggtttgtccaaactcatcaatgtatcttatcatgtctggatctgatcactgcttgagcctagaagatccggctgctaacaaagcccgaaaggaagctgggaatattaatagatcatggagataattaaaatgataaccatctcgcaaataaataagtattttactgttttcgtaacagttttgtaataaaaaaacctataaatattccggattattcataccgtcccaccatcgggcgcggatccgccaccatgcgtcccggcctgccctcctacctgatcgtgctggctgtgtgcctgctgtcccacctcctgtcctcccgttacggtgctgaggctatctccgagcccctggacaaggctttccacctcctgctgaacacctacggtcgtcctatccgtttcctgcgcgagaacaccacccagtgcacctacaactcctccctgcgcaactccaccgtcgtccgcgagaacgctatctccttcaacttcttccagtcctacaaccagtactacgtgttccacatgccccgttgcctgttcgctggtcccctggctgagcagttcctgaaccaggtggacctgaccgagactctcgagcgttaccagcagcgtctgaacacttacgctctggtgtccaaggacctggcttcctaccgttccttcagccagcagctgaaggctcaggactccctgggcgagcagcccaccactgtgcctccccctatcgacctgtccatcccccacgtgtggatgcccccccagaccactcctcacggctggaccgagtcccacaccacctccggactgcaccgtccccacttcaaccagacctgcatcctgttcgacggtcacgacctgctgttctccaccgtgaccccctgcctgcaccagggcttctacctcatcgacgagctgcgttacgtgaagatcaccctgaccgaggatttcttcgtggtcaccgtgtccatcgacgacgacacccccatgctgctgatcttcggtcacctcccccgtgtgctgttcaaggctccctaccagcgtgacaacttcatcctgcgtcagaccgagaagcacgagctgctggtgctggtcaagaaggaccagctgaaccgtcactcttacctgaaggaccccgacttcctggacgctgctctggacttcaactacctggacctgtccgctctgctgaggaactccttccaccgttacgctgtggacgtgctgaagtccggtcgttgccagatgctggaccgtcgtaccgtcgagatggctttcgcttacgccctggctctgttcgctgctgctcgtcaagaagaggctggcgctcaggtgtccgtgccccgtgctctggaccgtcaggctgctctgctgcagatccaagagttcatgatcacttgcctgtcccagaccccccctcgtaccaccctgctgctgtaccccaccgctgtggacctggctaagcgtgctctgtggacccccaaccagatcaccgacatcacctccctcgtgcgtctggtgtacatcctgtccaagcagaaccagcagcacctgatcccccagtgggctctgcgtcagatcgctgacttcgctctgaagctgcacaagacccacctggcttcattcctcagcgctttcgctcgccaagagctgtacctgatgggttccctggtgcactccatgctggtgcacaccaccgagcgtcgcgagatcttcatcgtggaaaccggcctgtgctccctggccgagctgtcccacttcacccagctgctggctcacccccaccacgagtacctgtccgacctgtacaccccctgctcctcttccggtcgtcgtgaccactccctggaacgtctgacccgtctgttccccgacgctaccgtgcctaccaccgtgcctgctgctctgtccatcctgtctaccatgcagccctccaccctggaaaccttccccgacctgttctgcctgcctctgggcgagtccttctccgctctgaccgtgtccgagcacgtgtcctacgtggtcaccaaccagtacctgatcaagggcatctcctaccccgtgtccaccaccgtcgtgggccagtccctgatcatcacccagaccgactcccagaccaagtgcgagctgacccgtaacatgcacaccactcactccatcaccgctgctctgaacatctccctcgagaactgcgctttctgccagtccgctctgttggagtacgacgacactcagggtgtcatcaacatcatgtacatgcacgactccgacgacgtgctgttcgctctggacccctacaacgaggtggtggtgtcctccccccgtacccactacctgatgctgctgaagaacggcaccgtgctggaagtgaccgacgtggtggtggacgctaccgaccgtctgctgatgatgtccgtgtacgctctgtccgctatcatcggcatctacctgctgtaccgtatgctgaagacctgctaaggcgccaagctttgtcgagaagtactagaggatcataatcagccataccacatttgtagaggttttacttgctttaaaaaacctcccacacctccccctgaacctgaaacataaaatgaatgcaattgttgttgttaacttgtttattgcagcttataatggttacaaataaagcaatagcatcacaaatttcacaaataaagcatttttttcactgcattctagttgtggtttgtccaaactcatcaatgtatcttatcatgtctggatctgatcactgcttgagcctagaagatccggctgctaacaaagcccgaaaggaagctgagttggctgctgccaccgctgagcaataactatcataacccctaggagatccgaaccagataagtgaaatctagttccaaactattttgtcatttttaattttcgtattagcttacgacgctacacccagttcccatctattttgtcactcttccctaaataatccttaaaaactccatttccacccctcccagttcccaactattttgtccgcccaca

SEQ ID NO: 50 - DNA, 27364 bp, Artificial Sequence
  Synthetic construct
ttgttccagtttggaacaagagtccactattaaagaacgtggactccaacgtcaaagggcgaaaaaccgtctatcagggcgatggcccactacgtgaaccatcaccctaatcaagttttttggggtcgaggtgccgtaaagcactaaatcggaaccctaaagggagcccccgatttagagcttgacggggaaagccggcgaacgtggcgagaaaggaagggaagaaagcgaaaggagcgggcgctagggcgctggcaagtgtagcggtcacgctgcgcgtaaccaccacacccgccgcgcttaatgcgccgctacagggcgcgtccattcgccattcaggctgcgcaactgttgggaagggcgatcggtgcgggcctcttcgctattacgccagctggcgaaagggggatgtgctgcaaggcgattaagttgggtaacgccagggttttcccagtcacgacgttgtaaaacgacggccagtgcatagaccagccgcgtaacctggcaaaatcggttacggttgagtaataaatggatgccctgcgtaagcgggtgtgggcggacaataaagtcttaaactgaacaaaatagatctaaactatgacaataaagtcttaaactagacagaatagttgtaaactgaaatcagtccagttatgctgtgaaaaagcatactggacttttgttatggctaaagcaaactcttcattttctgaagtgcaaattgcccgtcgtattaaagaggggcgtggccaagggcatggtaaagactatattcgcggcgttgtgacaatttaccgaacaactccgcggccgggaagccgatctcggcttgaacgaattgttaggtggcggtacttgggtcgatatcaaagtgcatcacttcttcccgtatgcccaactttgtatagagagccactgcgggatcgtcaccgtaatctgcttgcacgtagatcacataagcaccaagcgcgttggcctcatgcttgaggagattgatgagcgcggtggcaatgccctgcctccggtgctcgccggagactgcgagatcatagatatagatctcactacgcggctgctcaaacttgggcagaacgtaagccgcgagagcgccaacaaccgcttcttggtcgaaggcagcaagcgcgatgaatgtcttactacggagcaagttcccgaggtaatcggagtccggctgatgttgggagtaggtggctacgtctccgaactcacgaccgaaaagatcaagagcagcccgcatggatttgacttggtcagggccgagcctacatgtgcgaatgatgcccatacttgagccacctaactttgttttagggcgactgccctgctgcgtaacatcgttgctgctgcgtaacatcgttgctgctccataacatcaaacatcgacccacggcgtaacgcgcttgctgcttggatgcccgaggcatagactgtacaaaaaaacagtcataacaagccatgaaaaccgccactgcgccgttaccaccgctgcgttcggtcaaggttctggaccagttgcgtgagcgcatacgctacttgcattacagtttacgaaccgaacaggcttatgtcaactgggtttgtgccttcatccgtttccacggtgtgcgtcacccggcaaccttgggcagcagcgaagtcgaggcatttctgtcctggctggcgaacgagcgcaaggtttcggtctccacgcatcgtcaggcattggcggccttgctgttcttctacggcaaggtgctgtgcacggatctgcccttgcttcaggagatcggtagacctcggccgtcgcggcgcttgccggtggtgctgaccccggatgaagtggttcgcatcctcggttttctggaaggcgagcatcgtttgttcgcccaggactctagctatagttctagtggttggctacagctttgtttgtactatcaacaggttgaactgctgatcaacagatcctctacgcggccgcggtaccataacttcgtatagcatacattatacgaagttatctggtttaaacgtacccgtagtggctatggcagggcttgccgccccgacgttggctgcgagccctgggccttcacccgaacttgggggttggggtggggaaaaggaagaaacgcgggcgtattggtcccaatggggtctcggtggggtatcgacagagtgccagccctgggaccgaaccccgcgtttatgaacaaacgacccaacacccgtgcgttttattctgtctttttattgccgtcatagcgcgggttccttccggtattgtctccttccgtgtttcagttagcctcccccatctcccggtaccgcatgctatgcatcagctgctagcttactgcagccaccaccacagggagttcagggtggacaggttcacagcacgacggtgctcagggggggtcaggttgccgtaggtggaggactgcaggctgaagttacggatctcagacaggaacagcagggagtccaggtagtcccacatggggtcgatgaaggtgcgctggaaacgggtggatggggaggtgggggtggtcttgttgttgtcggaagcagtctcgttctcgacgggcatggtgtcgttgtagtacagggaggacatgtccagggtgccgtagatggtgtagggagtctcgttacggatcagcacgtgagtgttcttcatgaactcggacacagcggtacggttacggttgggcttgcagaagggctcgtcacggtaacgcagggtggtgtacacccaggtagccaggtccttcagctgagtggtcaggatagacttcatgaagttctcgtcgggacggtaaccgatggtagaggtggggatacgggtgggcacgatgggggagtaggtcacgttggtggaaacgttgaagatggtggaggtgtaggaggagtagggggtagtagtgctgacgcgggacttcttggagatggacttcacgggagcctgcttgcgcttcagcttgcgcatggtgttcttcagcttggtggagttgatgtacttgggcacacggaagatgttacgggacatagcgttgaccaggtagaaggaacgggtgcagttgcgctgagcgtaacgcagcagcagagcagccaggcccaggaagtagatagtctgggagtccacgttgaccttggaggggcccacgtacagcttggtgttccaacggggcacgttgaagaacatggggttgaaggtggtgaagttgccgcagttttcctcgccggtgttgttacgacgggacacgttcagcatctcggacaggcaggtcatggaggggatggtgccgcaagaggggggacggaaggtgatcttctggccggtgtggttgtactcggagtacacgtacttagcgggcttgcgcagctgggtggtgtggaagtcgaaccacaggtgggtgatggagtggttacggatgggaccagccaggatggagttgggggggaactgcttcatctcgacggtgatgttgtacagcttctgctggctggggaaggtgaagaacttgtagtagtcgccggtcttggaagccagctcttgcaggatacgcagcttcagctggcgttcctcttccttagccttctgggacttcacacggaaacgagccacagcgatcttgcagttgatgaagctgaacagcaggaaggtcagggacatcaggaagaacaggttgaacacgccacgcatctcgcccttgcgacccatggtggcctcgagatcccgggtgatcaagtcttcgtcgagtgattgtaaataaaatgtaatttacagtatagtattttaattaatatacaaatgatttgataataattcttatttaactataatatattgtgttgggttgaattaaaggtccgtatactagtatcgattcgcgacctactccggaatattaatagatcatggagataattaaaatgataaccatctcgcaaataaataagtattttactgttttcgtaacagttttgtaataaaaaaacctataaatattccggattattcataccgtcccaccatcgggcgcggatccgccaccatggaaaactggtccgctctggaactgctgcccaaggtcggaatccctaccgacttcctgacccacgtcaagacctccgctggcgaggaaatgttcgaggctctgaggatctactacggcgacgaccccgagcgttacaacatccacttcgaggctatcttcggcaccttctgcaaccgtctggaatgggtgtacttcctgacttccggcctggctgctgctgctcacgctatcaagttccacgacctgaacaagctgaccaccggcaagatgctgttccacgtgcaagtgccccgtgtggcttccggtgctggcctgcctacctcccgtcagaccaccatcatggtcaccaagtactccgagaagtcccccatcaccatccctttcgagctgtccgctgcttgcctgacttacctgcgtgaaaccttcgagggcaccatcctggacaagatcctgaacgtcgaggctatgcacaccgtgctgcgtgctctgaagaacaccgctgacgctatggaacgtggcctgatccacagcttcctccagaccctgctgaggaaggctcccccctacttcgtggtgcagaccctggtcgagaacgctaccctggctcgtcaggctctgaaccgtatccagcgctccaacatcctgcagtccttcaaggctaagatgctggctaccctgttcctgctgaaccgtacccgtgaccgtgactacgtgctgaagttcctgacccgtctggctgaggctgctaccgactccatcctcgacaaccctactacctacaccacctcctccggtgctaagatctccggtgtcatggtgtccaccgctaacgtgatgcagatcatcatgtccctgctgtcctcccacatcactaaggaaaccgtgtccgctcccgctacctacggcaacttcgtgctgtcccccgagaacgctgtgaccgctatctcctaccactctatcctggctgacttcaactcctacaaggctcacctgacctccggccagccccacctccccaacgactccctgagccaggctggtgctcactccctgacccccctgtccatggacgtgatccgtctgggcgaaaagaccgtgatcatggaaaacctgcgtcgcgtgtacaagaacaccgacaccaaggaccccctggaacgtaacgtggacctgaccttcttcttccccgtgggcctgtacctgcccgaggaccgtggttacaccaccgtcgagtccaaggtcaagctgaacgacaccgtgcgtaacgctctgcccaccaccgcttacctgctgaacagggaccgtgctgtgcaaaagatcgacttcgtggacgctctcaagaccctgtgccaccccgtgctgcacgagcctgctccatgcctgcaggctttcaccgagcgtggtcccccatccgagcccgctatgcagcgtctgctggaatgccgtttccagcaagagcccatgggtggtgctgctcgtcgtatcccccacttctaccgtgtgcgccgcgaggtgccccgtaccgtgaacgagatgaagcaggacttcgtggtcaccgacttctacaaggttggaaacatcaccctgtacaccgagctgcaccctttcttcgacttcacccactgccaagagaactccgagactgtggctctgtgcaccccccgtatcgtgatcggcaacctgcccgacggcctggctcccggtcccttccacgagctgaggacctgggagatcatggaacacatgcgcctgcgtcccccacccgactacgaggaaaccctgcgtctgttcaagaccaccgtgacctcccccaactaccccgagctgtgctacctggtggacgtgctggtgcacggcaacgctgacgctttcctgctgatccgcgctttcatcgctcgttgcatcgtgaacatgttccacacccgtcagctgctggtgttcgctcactcctacgctctggtcaccctgatcgctgagcacctggctgacggtgctctgcccccccagctcctgttccactaccgtaacctggtggctgtgctgcgcctggtcacccgtatctccgctctgcccggcctgaacaacggccagctggctgaggaacccctgtccgcttacgtgaacgctctgcacgaccacaggctgtggccccccttcgtgacccacctccctcgtaacatggaaggtgtccaggtggtggctgatcgtcagcccctgaaccccgctaacatcgaggctcgtcaccacggtgtctccgacgtgccccgtctgggtgctatggacgctgacgagcccctgttcgtggacgactaccgtgctaccgacgacgagtggaccctgcaaaaggtgttctacctgtgcctgatccccgctatgaccaacaaccgtgcttgcggcctgggcctgaacctcaagactctgctggtggacctgttctaccgtcccgccttcctgctcatgcccgctgctaccgctgtgtccacctccggcaccacctccaaggaatccacctctggtgtcacccccgaggactccgtggctgctcagcgtcaggctgtgggcgagatgctgaccgagctggtcgaggacgtggccaccgacgctcacacccctctgctgcaggcttgccgcgagctgttcctggctgtgcagttcgtgggcgagcacgtgaaggtgctggaagtgcgtgctcccctggaccacgctcagaggcagggactgcccgacttcatctcccgtcagcatgtgctgtacaacggttgctgcgtcgtgaccgctcctaagaccctgatcgagtactccctgcccgtgcccttccaccgtttctactccaaccccaccatctgcgctgctctgtccgacgacatcaagcgttacgtgaccgagttcccccactaccatagacacgatggtggtttccccctgcccaccgctttcgctcacgagtaccacaactggctgcgtagccccttctcccgttactccgctacctgccccaacgtgctgcactccgtgatgaccctggctgctatgctgtacaagatctcccccgtgtccctggtgctgcagaccaaggctcacatccaccccggtttcgctctgaccgctgtgcgtaccgacaccttcgaggtggacatgctgctgtactccggcaagtcctgcacctccgtcatcatcaacaaccccatcgtgaccaaggaagagagggacatctccaccacctaccacgtgacccagaacatcaacaccgtggacatgggcctgggttacacctccaacacttgcgtggcctacgtgaaccgcgtccgcaccgacatgggtgtccgtgtgcaggacctgttccgtgtgttccccatgaacgtgtaccgccacgatgaggtggaccgttggatcaggcacgctgctggcgtcgagcgtccccagctgctggacaccgagactatctccatgctgaccttcggttccatgtccgagcgcaacgctgctgctaccgtgcacggccagaaggctgtctgcgagctgatcctgacccctgtgactatggacgtgaactacttcaagatcaccaacaaccctcgtggtcgtgcttcctgcatgctgggcgtggacccctacgacaccgaggctgccaccaaggctatctacgaccaccgcgaggctgacgctcagaccttcgctgctacccacaacccatgggcttcccaggctggttgcctgtccgacgtcctgtacaacacccgtcaccgcgagcgtctgggctacaactccaagttctactccccctgcgctcagtacttcaacaccgaggaaatcatcgctgccaacaagaccctcttcaagaccatcgacgagtacctgctgcgcgctaaggactgcatccgtggcgacaccgacactcagtacgtgtgcgtcgagggaaccgagcagctgatcgagaacccttgccgtctgacccaagaggctctgcccatcctgtccaccaccaccctggctctgatggaaactaagctgaagggtggcgctggtgctttcgctacctccgagactcacttcggcaactacgtcgtgggagagatcatccccctgcagcagtccatgctgttcaacagctaagagctcaagcttgtcgagaagtactagaggatcataatcagccataccacatttgtagaggttttacttgctttaaaaaacctcccacacctccccctgaacctgaaacataaaatgaatgcaattgttgttgttaacttgtttattgcagcttataatggttacaaataaagcaatagcatcacaaatttcacaaataaagcatttttttcactgcattctagttgtggtttgtccaaactcatcaatgtatcttatcatgtctggatctgatcactgcttgagcctagaagatccggctgctaacaaagcccgaaaggaagctgagttggctgctgtggctagctttgtttaactttaagaaggagatacatctagaccggaatattaatagatcatggagataattaaaatgataaccatctcgcaaataaataagtattttactgttttcgtaacagttttgtaataaaaaaacctataaatattccggattattcataccgtcccaccatcgggcgcggatcccggtccgaagcgcgcggaattcaaaggcctacgtcgacgccaccatggaatcccgtggtcgtcgttgccccgagatgatctccgtgctgggtcccatctccggtcacgtcctgaaggctgtgttctcccgtggcgacacccccgtgctgccccacgaaactcgtctgctgcagaccggtatccacgtgcgtgtgtcccagccctccctgatcctggtgtcccagtacacccccgactccaccccttgccaccgcggagacaaccagctgcaggtccagcacacctacttcaccggttccgaggtcgagaacgtgtccgtgaacgtgcacaaccccaccggtcgttccatctgcccctcccaagagcccatgtccatctacgtgtacgctctgcccctgaagatgctgaacatcccctccatcaacgtgcaccactacccctccgctgctgagcgcaagcaccgtcacctccccgtggctgacgctgtgatccacgcttccggcaagcagatgtggcaggctcgtctgaccgtgtccggcctggcttggacccgtcagcagaaccagtggaaggaacccgacgtgtactacacctccgctttcgtgttccccaccaaggacgtggccctgcgtcacgtcgtgtgcgctcacgaactcgtgtgctccatggaaaacacccgtgctaccaagatgcaagtgatcggcgaccagtacgtgaaggtgtacctggaatccttctgcgaggacgtgccctccggcaagctgttcatgcacgtgaccctgggttccgacgtggaagaggacctgaccatgacccgtaacccccagcccttcatgcgtccccacgagcgtaacggtttcaccgtgctgtgccccaagaacatgatcatcaagcccggcaagatctcccacatcatgctggacgtggccttcacctcccacgagcacttcggcctgctgtgccctaagtccatccccggcctgtccatctccggcaacctgctgatgaacggccagcagatcttcctggaagtgcaggctatccgtgaaaccgtcgagctgcgtcagtacgaccctgtggctgctctgttcttcttcgacatcgacctgctgctgcagcgtggtccccagtactccgagcaccccaccttcaccagccagtaccgtatccagggcaagctggaataccgtcacacctgggaccgtcacgacgagggtgctgctcagggcgacgacgacgtgtggacctccggttccgactccgacgaggaactggtcaccaccgagcgcaagaccccccgtgtgaccggtggtggtgctatggctggtgcttccacctccgctggtcgcaagcgcaagtccgcttcctccgctaccgcttgcaccgctggtgtcatgacccgtggtcgcctgaaggctgagtccaccgtggctcccgaagaggacactgacgaggactccgacaacgagatccacaaccccgctgtgttcacctggcccccctggcaggctggtatcctggctcgtaacctggtgcccatggtggctaccgtgcagggccagaacctgaagtaccaagagttcttctgggacgccaacgacatctaccgtatcttcgctgagctggaaggcgtgtggcagcccgctgctcagcccaagcgtcgtcgtcaccgtcaggacgctctgcctggtccctgtatcgcttccacccccaagaagcaccgcggctaaaagcttgtcgagaagtactagaggatcataatcagccataccacatttgtagaggttttacttgctttaaaaaacctcccacacctccccctgaacctgaaacataaaatgaatgcaattgttgttgttaacttgtttattgcagcttataatggttacaaataaagcaatagcatcacaaatttcacaaataaagcatttttttcactgcattctagttgtggtttgtccaaactcatcaatgtatcttatcatgtctggatctgatcactgcttgagcctagaagatccggctgctaacaaagcccgaaaggaagctgagttggctgctgccaccgctgagcaataactatcataaccggaatattaatagatcatggagataattaaaatgataaccatctcgcaaataaataagtattttactgttttcgtaacagttttgtaataaaaaaacctataaatattccggattattcataccgtcccaccatcgggcgcggatcccggtccgaagcgcgcggaattcgccaccatgaccatggacgagcagcagccccaggctgtgacccccgtgtacgtgggcggtttcctggctcgttacgaccagtcccccgacgaggctgagctgctgctgccacgtgacgtggtcgaacactggctgcacgctcagggccagggacagccttccctgtccgtggctctgcccctgaacatcaaccacgacgacaccgctgtcgtgggtcacgtggccgctatgcagtccgtgcgtgacggcctgttctgcctgggttgcgtgacctccccccgtttcctggaaatcgtgcgtcgtgcttccgagaagtccgagctggtgtcccgtggtcccgtgtccccactgcagcccgacaaggtggtcgagttcctgtccggttcctacgctggcctgtccctgtcatcccgtcgttgcgacgacgtcgaggctgctacctccctgagcggctccgagactacccccttcaagcacgtggccctgtgctccgtgggtcgtaggcgtggaaccctggctgtgtacggtcgtgaccccgagtgggtcacccagcgtttccccgacctgaccgctgctgaccgtgacggactgcgtgctcagtggcagcgttgcggttccaccgctgtggacgcttccggcgaccccttccgttccgactcctacggcctgctgggcaactccgtggacgctctgtacatccgcgagcgtctgcccaagctgcgttacgacaagcagctcgtgggtgtcaccgagcgcgagtcctacgtgaaggcttccgtgtcccccgaggctgcttgcgacatcaaggctgcttccgctgagcgttctggcgacagccgctcccaggctgctactcctgctgctggtgctcgtgtgccctccagctccccatccccacctgtcgagcctccctcccccgtgcaacctcctgctctgcctgcttccccctccgtgctgcctgctgagtccagcccctccctgtcaccctctgagcctgctgaggctgcctccatgtcccaccctctgagcgctgctgtgactgctgctaccgctccccctggtgctactgtggctggtgcttcccccgctgtgccttccctggcttggcctcacgacggtgtctacctgcccaaggacgctttcttctccctgctgggcgcttcccgttccgctgctcccgtgatgtaccccggtgctgtggctgctccccccagcgcttcacctgctcctctgcccctgccctcctaccccgcttcctacggtgctcccgtcgtgggttacgaccagctggctgctcgtcacttcgctgactacgtggacccccactaccccggctggggtcgtcgttacgagcccgctccttccctgcacccatcctaccctgtgccccctcctccatcacccgcttactaccgtcgtcgtgactcccccggtggcatggacgagcctccatctggatgggagcgttacgacggttcccaccgtggccagtcccaaaagcagcaccgtcacggtggttccggtggtcacaacaagcgtcgcaaggaagccgctgctgcatcctccagctccgacgaggacctgagcttccccggcgaggctgaacacggtcgtgctcgcaagcgtctgaagtcccacgtgaactccgacggaggtagcggaggccacgctggttccaaccagcagcagcaacagcgctacgacgagctgcgtgacgctatccacgagctgaagcgtgacctgttcgctgctcgccagtcctccaccctgctgtctgctgctctgccagctgccgcttcttcctcccctaccaccaccaccgtgtgcacccctactggcgagctgacctctggtggtggcgagactcccaccgctctgctgtccggtggtgctaaggtggccgagcgtgctcaggctggtgtcgtgaacgcttcctgccgtctggctaccgcttccggttccgaggctgccaccgctggtccctctaccgctggttcctcatcctgcccagcttccgtggtgctggctgccgctgctgctcaagccgccgctgcttcacagtcccccccaaaggatatggtggacctgaaccgtcgtatcttcgtggctgctctgaacaagctcgagtaataaaagcttgtcgagaagtactagaggatcataatcagccataccacatttgtagaggttttacttgctttaaaaaacctcccacacctccccctgaacctgaaacataaaatgaatgcaattgttgttgttaacttgtttattgcagcttataatggttacaaataaagcaatagcatcacaaatttcacaaataaagcatttttttcactgcattctagttgtggtttgtccaaactcatcaatgtatcttatcatgtctggatctgatcactgcttgagcctagaagatccggctgctaacaaagcccgaaaggaagctgggaatattaatagatcatggagataattaaaatgataaccatctcgcaaataaataagtattttactgttttcgtaacagttttgtaataaaaaaacctataaatattccggattattcataccgtcccaccatcgggcgcggatccgccaccatggctgctatggaagctaacatcttctgcaccttcgaccacaagctgtctatcgctgacgtgggcaagctgaccaagctggtggctgctgtggtgcccatcccccagcgtctgcacctgatcaagcactaccagctgggcctgcaccagttcgtggaccacacccgtggttacgtgcgtctgcgtggcctgctgcgtaacatgaccctgaccctgatgcgtcgtgtcgagggcaaccagatcctgctgcacgtgcccacccacggcctgctgtacaccgtgctgaacaccggtcccgtgacctgggagaagggcgacgctctgtgcgtgctgccccccctgttccacggtcccctggctcgtgaaaacctgttgaccctgggccagtgggagctggtgctgccctggatcgtgcccatgcccctggctctggaaatcaaccagcgcctgctgatcatgggcctgttctccctggaccgttcctacgaagaagtgaaggctgctgtccagcagctgcagaccatcaccttccgtgacgctaccttcaccatccccgaccccgtgatcgaccagcacctcctgatcgacatgaagaccgcttgcctgtccatgtccatggtggctaacctggcttccgagctgaccatgacctacgtccgcaagctggctttggaggactcttccatgctgctggtcaagtgccaagagctgctgatgcgtctggaccgcgagcgttccgtgggcgagcctcgtactcccgctcgtcctcagcacgtgtcccccgacgacgagatcgctcgtctgtccgctctgttcgtgatgctgcgtcagctggacgacctgatccgcgagcaggtcgtgttcaccgtgtgcgacgtgagcccagacaacaagtccgctacctgcatcttcaagggctaaggcgcgccaagcttgtcgagaagtactagaggatcataatcagccataccacatttgtagaggttttacttgctttaaaaaacctcccacacctccccctgaacctgaaacataaaatgaatgcaattgttgttgttaacttgtttattgcagcttataatggttacaaataaagcaatagcatcacaaatttcacaaataaagcatttttttcactgcattctagttgtggtttgtccaaactcatcaatgtatcttatcatgtctggatctgatcactgcttgagcctagaagatccggctgctaacaaagcccgaaaggaagctgagttggctgctgccaccgctgagcaataactatcataacccctaggggcctctaaacgggtcttgaggggttttttgctgaaaggaggaactatatccggatctgaacaggagggacagctgatagaaacagaagccactggagcacctcaaaaacaccatcatacactaaatcagtaagttggcagcatcacccgacgcactttgcgccgaataaatacctgtgacggaagatcacttcgcagaataaataaatcctggtgtccctgttgataccgggaagccctgggccaacttttggcgaaaatgagacgttgatcggcacgtaagaggttccaactttcaccataatgaaataagatcactaccgggcgtattttttgagttatcgagattttcaggagctaaggaagctaaaatggagaaaaaaatcactggatataccaccgttgatatatcccaatggcatcgtaaagaacattttgaggcatttcagtcagttgctcaatgtacctataaccagaccgttcagctggatattacggcctttttaaagaccgtaaagaaaaataagcacaagttttatccggcctttattcacattcttgcccgcctgatgaatgctcatccggaattccgtatggcaatgaaagacggtgagctggtgatatgggatagtgttcacccttgttacaccgttttccatgagcaaactgaaacgttttcatcgctctggagtgaataccacgacgatttccggcagtttctacacatatattcgcaagatgtggcgtgttacggtgaaaacctggcctatttccctaaagggtttattgagaatatgtttttcgtctcagccaatccctgggtgagtttcaccagttttgatttaaacgtggccaatatggacaacttcttcgcccccgttttcaccatgggcaaatattatacgcaaggcgacaaggtgctgatgccgctggcgattcaggttcatcatgccgtttgtgatggcttccatgtcggcagaatgcttaatgaattacaacagtactgcgatgagtggcagggcggggcgtaatttttttaaggcagttattggtgcccttaaacgcctggttgctacgcctgaataagtgataataagcggatgaatggcagaaattcgaaagcaaattcgacccggtcgtcggttcagggcagggtcgttaaatagccgcttatgtctattgctggtttaccggtttattgactaccggaagcagtgtgaccgtgtgcttctcaaatgcctgaggccagtttgctcaggctctccccgtggaggtaataattgacgatatgatcatttattctgcctcccagctgacattcatccggggtcagcaccgtttctgcggactggctttctacgtgttccgcttcctttagcagcccttgcgccctgagtgcttgcggcagcgtgaagctaattctgtcagccgttaagtgttcctgtgtcactcaaaattgctttgagaggctctaagggcttctcagtgcgttacatccctggcttgttgtccacaaccgttaaaccttaaaagctttaaaagccttatatattcttttttttcttataaaacttaaaaccttagaggctatttaagttgctgatttatattaattttattgttcaaacatgagagcttagtacgtgaaacatgagagcttagtacgttagccatgagagcttagtacgttagccatgagggtttagttcgttaaacatgagagcttagtacgttaaacatgagagcttagtacgtgaaacatgagagcttagtacgtactatcaacaggttgaactgctgatcaacagatcctctacgcggccgcggtaccataacttcgtatagcatacattatacgaagttatctggtttaaacgtacccgtagtggctatggcagggcttgccgccccgacgttggctgcgagccctgggccttcacccgaacttgggggttggggtggggaaaaggaagaaacgcgggcgtattggtcccaatggggtctcggtggggtatcgacagagtgccagccctgggaccgaaccccgcgtttatgaacaaacgacccaacacccgtgcgttttattctgtctttttattgccgtcatagcgcgggttccttccggtattgtctccttccgtgtttcagttagcctcccccatctcccggtaccgcatgctatgcatcagctgctagcttagcgagcgtccacagcctggggaccgtaacgggagtgagcgggcaggttcacacgggtctgcttcagctcagggggcaggccagcgtagtacttgtccaggtgacgcagcaggggggggtccagctggtgacgcaggcagaattccttcacagcgttgtacaggccgtagaacagggtgataccctcgggagcagcagcggtggacacgggcagacgcacagcacggttggtacgggtagcctcgttacggatagccaccaccacgttgaacagggaggggggcaccagctcgaaacccagcacgtgttcggtgaagatggaacgaccgtaggacagacgagtcaggtcgtaaccacggcacaggtcgtccacgcaagtgtacacagcgggggaaccgtcgccgcactcggagtaaccgcgcatcacggtcatccaacggggagcggtgtcggaggacagcagggtcagcagagcacgcagctggtcggggttgttgtacagcagggccagggtgtccaggaaagcgtcgtccagcagcacggagttagcagcctcgggggtcacgggacggtaacggatcagctgggacaggggaccgtccctacgggtcacgttgaccaggggacgcagccaggactcgtacttgtcgccctggaacacctctcccagcaggcaacgacgggtcagctcggggcactcagcgggcaccttctcagccacggtgggagccacggacacggtagcggaggacacgatgggcagcagcaggcagcaccacagcagagccacgggaccgggggagaaggagaaaccgcagtcgggacgacggcacatggtggctcgagatcccgggtgatcaagtcttcgtcgagtgattgtaaataaaatgtaatttacagtatagtattttaattaatatacaaatgatttgataataattcttatttaactataatatattgtgttgggttgaattaaaggtccgtatactagtatcgattcgcgacctactccggaatattaatagatcatggagataattaaaatgataaccatctcgcaaataaataagtattttactgttttcgtaacagttttgtaataaaaaaacctataaatattccggattattcataccgtcccaccatcgggcgcggatccgccaccatgaactccaaggacctgacccccttcctgaccaccctgtggctgctgctggaccactcccgtgtgcctcgtgtgcgtgctgaggaatgctgcgaagtgatcaacgtgaaccacccccccgagcgctgctacgacttcaagatgtgcaacctgttcaccgtggctctgcgttgccccgacggcgaagtgtgctactcccccgaaaagaccgctgagatccgtggtatcgtgaccaccatgacccactccctgacccgtcaagtgatccacaacaagctgaccagctgcaactacaaccccctgtacctcgaggctgacggtcgtatccgttgcggcaaggtgtccgacaaggctcagtacctgctgggtgctgctggttccgtgccctaccgttggatcaacctcgagtacgacaagatcacccgtatcgtgggcctggaccagtacctcgagtccgtgaagaagcacaagcgtctggacgtgtgccgtgctaagatgggttacatgctgcagtaaaagcttgtcgagaagtactagaggatcataatcagccataccacatttgtagaggttttacttgctttaaaaaacctcccacacctccccctgaacctgaaacataaaatgaatgcaattgttgttgttaacttgtttattgcagcttataatggttacaaataaagcaatagcatcacaaatttcacaaataaagcatttttttcactgcattctagttgtggtttgtccaaactcatcaatgtatcttatcatgtctggatctgatcactgcttgagcctagaagatccggctgctaacaaagcccgaaaggaagctgagttggctgctgtggctagctttgtttaactttaagaaggagatacatctagaccggaatattaatagatcatggagataattaaaatgataaccatctcgcaaataaataagtattttactgttttcgtaacagttttgtaataaaaaaacctataaatattccggattattcataccgtcccaccatcgggcgcggatccgccaccatgctgcgtctgctgctgcgtcaccacttccactgcctgctgctgtgcgctgtgtgggctaccccctgcctggcttccccttggtccaccctgaccgctaaccagaacccctccccaccctggtccaagctgacctactccaagccccacgacgctgctaccttctactgccccttcctgtacccatccccccctcgttccccactgcagttctccggtttccagcgtgtgctgaccggtcccgagtgccgtaacgagactctgtacctgctgtacaaccgcgagggccagaccctggtcgagaggtcctccacctgggtcaagaaggtcatctggtacttgtccggtcgtaaccagaccatcctgcagcgtatgccccgtaccgcttccaagccctccgacggcaacgtgcagatctccgtcgaggacgctaagatcttcggtgctcacatggtgcccaagcagaccaagctgctgcgtttcgtggtcaacgacggcacccgttaccagatgtgcgtgatgaagctcgagtcctgggctcacgtgttccgtgactactccgtgtccttccaagtgcgcctgaccttcaccgaggctaacaaccagacctacaccttctgcacccaccccaacctgatcgtgtaaaagcttgtcgagaagtactagaggatcataatcagccataccacatttgtagaggttttacttgctttaaaaaacctcccacacctccccctgaacctgaaacataaaatgaatgcaattgttgttgttaacttgtttattgcagcttataatggttacaaataaagcaatagcatcacaaatttcacaaataaagcatttttttcactgcattctagttgtggtttgtccaaactcatcaatgtatcttatcatgtctggatctgatcactgcttgagcctagaagatccggctgctaacaaagcccgaaaggaagctgagttggctgctgggtgcctaatgagtgagctaactcacattaattgcccggaatattaatagatcatggagataattaaaatgataaccatctcgcaaataaataagtattttactgttttcgtaacagttttgtaataaaaaaacctataaatattccggattattcataccgtcccaccatcgggcgcggatccgccaccatgcgtctgtgccgtgtgtggctgtccgtgtgcctgtgcgctgtggtgctgggccagtgccagcgtgaaaccgctgagaagaacgactactaccgtgtgccccactactgggacgcttgctcccgtgctctgcccgaccagacccgttacaagtacgtcgagcagctggtggacctgaccctgaactaccactacgacgcttcccacggcctggacaacttcgacgtgctgaagcgtatcaacgtgaccgaggtgtccctgctgatctccgacttccgtcgtcagaaccgtcgtggtggcaccaacaagcgtaccaccttcaacgctgctggttccctggctccccacgctcgttccctcgagttctccgtgcgtctgttcgctaactaaaagcttgtcgagaagtactagaggatcataatcagccataccacatttgtagaggttttacttgctttaaaaaacctcccacacctccccctgaacctgaaacataaaatgaatgcaattgttgttgttaacttgtttattgcagcttataatggttacaaataaagcaatagcatcacaaatttcacaaataaagcatttttttcactgcattctagttgtggtttgtccaaactcatcaatgtatcttatcatgtctggatctgatcactgcttgagcctagaagatccggctgctaacaaagcccgaaaggaagctgagttggctgctgccaccgctgagcaataactatcataacccccggaatattaatagatcatggagataattaaaatgataaccatctcgcaaataaataagtattttactgttttcgtaacagttttgtaataaaaaaacctataaatattccggattattcataccgtcccaccatcgggcgcggatcccggtccgaagcgcgcggaattcaaaggcctaccgtcgacgccaccatggaatcccgtatctggtgcctggtcgtgtgcgtgaacctgtgcatcgtgtgcctgggtgctgctgtgtcctcctcctccacccgtggcacctccgctacccactcccaccactcctcccacaccacctccgccgctcactcccgttccggttccgtgtcccagcgtgtgacctcctcccagaccgtgtcccacggtgtcaacgagactatctacaacaccaccctgaagtacggcgacgtcgtgggtgtcaacaccaccaagtacccctaccgtgtgtgctccatggctcagggcaccgacctgatccgtttcgagcgtaacatcgtgtgcacctccatgaagcccatcaacgaggacctggacgagggtatcatggtggtgtacaagcgcaacatcgtggctcacaccttcaaggtccgcgtgtaccagaaggtgctgaccttccgtcgttcctacgcttacatccacaccacttacctgctgggttccaacaccgagtacgtggcccctcccatgtgggagatccaccacatcaactcccactcccagtgctactcctcttactcccgtgtgatcgctggcaccgtgttcgtggcttaccaccgtgactcctacgagaacaagaccatgcagctgatgcccgacgactactccaacacccactccacccgttacgtgaccgtgaaggaccagtggcactcccgtggttccacctggctgtaccgtgaaacctgcaacctgaactgcatggtcaccatcaccaccgctcgttccaagtacccttaccacttcttcgctacctccaccggcgacgtggtggacatctcccccttctacaacggtactaaccgtaacgcttcctacttcggcgagaacgctgacaagttcttcatcttccccaactacaccatcgtgtccgacttcggtcgtcccaactccgctctggaaacccaccgtctggtggctttcttggagcgtgctgactccgtgatctcctgggacatccaggacgagaagaacgtgacctgccagctgaccttctgggaggcttccgagcgtaccatccgttccgaggctgaggactcctaccacttctccagcgctaagatgaccgctaccttcctgtccaagaaacaagaggtcaacatgtccgactccgccctggactgcgtgcgtgacgaggctatcaacaagctgcagcagatcttcaacacctcctacaaccagacctacgagaagtacggaaacgtgtccgtgttcgagactaccggtggcctggtggtgttctggcagggtatcaagcagaagtccctggtcgagctggaacgtctggctaaccgttcctccctgaacctgacccacaaccgtaccaagcgttccaccgacggcaacaacgctactcacctgtccaacatggaatccgtgcacaacctggtgtacgctcagctgcagttcacctacgacaccctgcgcggttacatcaaccgtgctctggctcagatcgctgaggcttggtgcgtggaccagcgtcgtaccctggaagtgttcaaggaactgtccaagatcaacccctccgctatcctgtccgccatctacaacaagcctatcgctgctcgtttcatgggcgacgtgctgggcctggcttcctgcgtgaccatcaaccagacttccgtgaaggtgctgcgtgacatgaacgtgaaggaatcccccggtcgttgctactcccgtcccgtggtcatcttcaacttcgctaactcctcctacgtgcagtacggccagctgggcgaggacaacgagatcctgctgggcaaccaccgtaccgaggaatgccagctgccctccctgaagatcttcatcgctggcaactccgcttacgaatacgtggactacctgttcaagcgcatgatcgacctgtcctccatctctaccgtggactccatgatcgctctggacatcgaccccctggaaaacaccgacttccgtgtgctggaactgtactcccagaaggaactgcgttccatcaacgtgttcgacctggaagagatcatgcgcgagttcaactcctacaagcagcgtgttaagtacgtcgaggacaaggtggtggaccccctgcccccctacctgaagggactggacgacctgatgtccggcctgggagctgccggcaaggctgtgggtgtcgctatcggtgctgtgggtggtgctgtggcttccgtggtcgagggtgtcgccaccttcctgaagaaccccttcggtgctttcaccatcatcctggtggctatcgctgtggtcatcatcatctacctgatctacacccgtcagcgtcgtctgtgcatgcagcccctgcagaacctgttcccctacctggtgtccgctgacggtactaccgtgacctccggcaacaccaaggacacctccctgcaggctcccccatcctacgaggaatccgtctacaactccggtcgcaagggtcccggtcccccttcctccgacgcttctaccgctgctcccccatacaccaacgagcaggcttaccagatgctgctggctctcgtgcgtctggacgctgagcagcgtgcacagcagaacggcaccgactccctggacggccagaccggaacccaggacaagggccagaagcccaacctgctggaccgtctgcgtcaccgcaagaacggttaccgtcacctgaaggactccgacgaggaagagaacgtctaaggcgcgccaagcttgtcgagaagtactagagatcataatcagccataccacatttgtagaggttttacttgctttaaaaaacctcccacacctccccctgaacctgaaacataaaatgaatgcaattgttgttgttaacttgtttattgcagcttataatggttacaaataaagcaatagcatcacaaatttcacaaataaagcatttttttcactgcattctagttgtggtttgtccaaactcatcaatgtatcttatcatgtctggatctgatcactgcttgagcctagaagatccggctgctaacaaagcccgaaaggaagctgggaatattaatagatcatggagataattaaaatgataaccatctcgcaaataaataagtattttactgttttcgtaacagttttgtaataaaaaaacctataaatattccggattattcataccgtcccaccatcgggcgcggatccgccaccatgcgtcccggcctgccctcctacctgatcgtgctggctgtgtgcctgctgtcccacctcctgtcctcccgttacggtgctgaggctatctccgagcccctggacaaggctttccacctcctgctgaacacctacggtcgtcctatccgtttcctgcgcgagaacaccacccagtgcacctacaactcctccctgcgcaactccaccgtcgtccgcgagaacgctatctccttcaacttcttccagtcctacaaccagtactacgtgttccacatgccccgttgcctgttcgctggtcccctggctgagcagttcctgaaccaggtggacctgaccgagactctcgagcgttaccagcagcgtctgaacacttacgctctggtgtccaaggacctggcttcctaccgttccttcagccagcagctgaaggctcaggactccctgggcgagcagcccaccactgtgcctccccctatcgacctgtccatcccccacgtgtggatgcccccccagaccactcctcacggctggaccgagtcccacaccacctccggactgcaccgtccccacttcaaccagacctgcatcctgttcgacggtcacgacctgctgttctccaccgtgaccccctgcctgcaccagggcttctacctcatcgacgagctgcgttacgtgaagatcaccctgaccgaggatttcttcgtggtcaccgtgtccatcgacgacgacacccccatgctgctgatcttcggtcacctcccccgtgtgctgttcaaggctccctaccagcgtgacaacttcatcctgcgtcagaccgagaagcacgagctgctggtgctggtcaagaaggaccagctgaaccgtcactcttacctgaaggaccccgacttcctggacgctgctctggacttcaactacctggacctgtccgctctgctgaggaactccttccaccgttacgctgtggacgtgctgaagtccggtcgttgccagatgctggaccgtcgtaccgtcgagatggctttcgcttacgccctggctctgttcgctgctgctcgtcaagaagaggctggcgctcaggtgtccgtgccccgtgctctggaccgtcaggctgctctgctgcagatccaagagttcatgatcacttgcctgtcccagaccccccctcgtaccaccctgctgctgtaccccaccgctgtggacctggctaagcgtgctctgtggacccccaaccagatcaccgacatcacctccctcgtgcgtctggtgtacatcctgtccaagcagaaccagcagcacctgatcccccagtgggctctgcgtcagatcgctgacttcgctctgaagctgcacaagacccacctggcttcattcctcagcgctttcgctcgccaagagctgtacctgatgggttccctggtgcactccatgctggtgcacaccaccgagcgtcgcgagatcttcatcgtggaaaccggcctgtgctccctggccgagctgtcccacttcacccagctgctggctcacccccaccacgagtacctgtccgacctgtacaccccctgctcctcttccggtcgtcgtgaccactccctggaacgtctgacccgtctgttccccgacgctaccgtgcctaccaccgtgcctgctgctctgtccatcctgtctaccatgcagccctccaccctggaaaccttccccgacctgttctgcctgcctctgggcgagtccttctccgctctgaccgtgtccgagcacgtgtcctacgtggtcaccaaccagtacctgatcaagggcatctcctaccccgtgtccaccaccgtcgtgggccagtccctgatcatcacccagaccgactcccagaccaagtgcgagctgacccgtaacatgcacaccactcactccatcaccgctgctctgaacatctccctcgagaactgcgctttctgccagtccgctctgttggagtacgacgacactcagggtgtcatcaacatcatgtacatgcacgactccgacgacgtgctgttcgctctggacccctacaacgaggtggtggtgtcctccccccgtacccactacctgatgctgctgaagaacggcaccgtgctggaagtgaccgacgtggtggtggacgctaccgaccgtctgctgatgatgtccgtgtacgctctgtccgctatcatcggcatctacctgctgtaccgtatgctgaagacctgctaaggcgccaagctttgtcgagaagtactagaggatcataatcagccataccacatttgtagaggttttacttgctttaaaaaacctcccacacctccccctgaacctgaaacataaaatgaatgcaattgttgttgttaacttgtttattgcagcttataatggttacaaataaagcaatagcatcacaaatttcacaaataaagcatttttttcactgcattctagttgtggtttgtccaaactcatcaatgtatcttatcatgtctggatctgatcactgcttgagcctagaagatccggctgctaacaaagcccgaaaggaagctgagttggctgctgccaccgctgagcaataactatcataacccctaggagatccgaaccagataagtgaaatctagttccaaactattttgtcatttttaattttcgtattagcttacgacgctacacccagttcccatctattttgtcactcttccctaaataatccttaaaaactccatttccacccctcccagttcccaactattttgtccgcccaca

SEQ ID NO: 51 - DNA, 27385 bp, Artificial Sequence
  Synthetic construct
ttgttccagtttggaacaagagtccactattaaagaacgtggactccaacgtcaaagggcgaaaaaccgtctatcagggcgatggcccactacgtgaaccatcaccctaatcaagttttttggggtcgaggtgccgtaaagcactaaatcggaaccctaaagggagcccccgatttagagcttgacggggaaagccggcgaacgtggcgagaaaggaagggaagaaagcgaaaggagcgggcgctagggcgctggcaagtgtagcggtcacgctgcgcgtaaccaccacacccgccgcgcttaatgcgccgctacagggcgcgtccattcgccattcaggctgcgcaactgttgggaagggcgatcggtgcgggcctcttcgctattacgccagctggcgaaagggggatgtgctgcaaggcgattaagttgggtaacgccagggttttcccagtcacgacgttgtaaaacgacggccagtgcatagaccagccgcgtaacctggcaaaatcggttacggttgagtaataaatggatgccctgcgtaagcgggtgtgggcggacaataaagtcttaaactgaacaaaatagatctaaactatgacaataaagtcttaaactagacagaatagttgtaaactgaaatcagtccagttatgctgtgaaaaagcatactggacttttgttatggctaaagcaaactcttcattttctgaagtgcaaattgcccgtcgtattaaagaggggcgtggccaagggcatggtaaagactatattcgcggcgttgtgacaatttaccgaacaactccgcggccgggaagccgatctcggcttgaacgaattgttaggtggcggtacttgggtcgatatcaaagtgcatcacttcttcccgtatgcccaactttgtatagagagccactgcgggatcgtcaccgtaatctgcttgcacgtagatcacataagcaccaagcgcgttggcctcatgcttgaggagattgatgagcgcggtggcaatgccctgcctccggtgctcgccggagactgcgagatcatagatatagatctcactacgcggctgctcaaacttgggcagaacgtaagccgcgagagcgccaacaaccgcttcttggtcgaaggcagcaagcgcgatgaatgtcttactacggagcaagttcccgaggtaatcggagtccggctgatgttgggagtaggtggctacgtctccgaactcacgaccgaaaagatcaagagcagcccgcatggatttgacttggtcagggccgagcctacatgtgcgaatgatgcccatacttgagccacctaactttgttttagggcgactgccctgctgcgtaacatcgttgctgctgcgtaacatcgttgctgctccataacatcaaacatcgacccacggcgtaacgcgcttgctgcttggatgcccgaggcatagactgtacaaaaaaacagtcataacaagccatgaaaaccgccactgcgccgttaccaccgctgcgttcggtcaaggttctggaccagttgcgtgagcgcatacgctacttgcattacagtttacgaaccgaacaggcttatgtcaactgggtttgtgccttcatccgtttccacggtgtgcgtcacccggcaaccttgggcagcagcgaagtcgaggcatttctgtcctggctggcgaacgagcgcaaggtttcggtctccacgcatcgtcaggcattggcggccttgctgttcttctacggcaaggtgctgtgcacggatctgcccttgcttcaggagatcggtagacctcggccgtcgcggcgcttgccggtggtgctgaccccggatgaagtggttcgcatcctcggttttctggaaggcgagcatcgtttgttcgcccaggactctagctatagttctagtggttggctacagctttgtttgtactatcaacaggttgaactgctgatcaacagatcctctacgcggccgcggtaccataacttcgtatagcatacattatacgaagttatctggtttaaacgtacccgtagtggctatggcagggcttgccgccccgacgttggctgcgagccctgggccttcacccgaacttgggggttggggtggggaaaaggaagaaacgcgggcgtattggtcccaatggggtctcggtggggtatcgacagagtgccagccctgggaccgaaccccgcgtttatgaacaaacgacccaacacccgtgcgttttattctgtctttttattgccgtcatagcgcgggttccttccggtattgtctccttccgtgtttcagttagcctcccccatctcccggtaccgcatgctatgcatcagctgctagcttactgcagccaccaccacagggagttcagggtggacaggttcacagcacgacggtgctcagggggggtcaggttgccgtaggtggaggactgcaggctgaagttacggatctcagacaggaacagcagggagtccaggtagtcccacatggggtcgatgaaggtgcgctggaaacgggtggatggggaggtgggggtggtcttgttgttgtcggaagcagtctcgttctcgacgggcatggtgtcgttgtagtacagggaggacatgtccagggtgccgtagatggtgtagggagtctcgttacggatcagcacgtgagtgttcttcatgaactcggacacagcggtacggttacggttgggcttgcagaagggctcgtcacggtaacgcagggtggtgtacacccaggtagccaggtccttcagctgagtggtcaggatagacttcatgaagttctcgtcgggacggtaaccgatggtagaggtggggatacgggtgggcacgatgggggagtaggtcacgttggtggaaacgttgaagatggtggaggtgtaggaggagtagggggtagtagtgctgacgcgggacttcttggagatggacttcacgggagcctgcttgcgcttcagcttgcgcatggtgttcttcagcttggtggagttgatgtacttgggcacacggaagatgttacgggacatagcgttgaccaggtagaaggaacgggtgcagttgcgctgagcgtaacgcagcagcagagcagccaggcccaggaagtagatagtctgggagtccacgttgaccttggaggggcccacgtacagcttggtgttccaacggggcacgttgaagaacatggggttgaaggtggtgaagttgccgcagttttcctcgccggtgttgttacgacgggacacgttcagcatctcggacaggcaggtcatggaggggatggtgccgcaagaggggggacggaaggtgatcttctggccggtgtggttgtactcggagtacacgtacttagcgggcttgcgcagctgggtggtgtggaagtcgaaccacaggtgggtgatggagtggttacggatgggaccagccaggatggagttgggggggaactgcttcatctcgacggtgatgttgtacagcttctgctggctggggaaggtgaagaacttgtagtagtcgccggtcttggaagccagctcttgcaggatacgcagcttcagctggcgttcctcttccttagccttctgggacttcacacggaaacgagccacagcgatcttgcagttgatgaagctgaacagcaggaaggtcagggacatcaggaagaacaggttgaacacgccacgcatctcgcccttgcgacccatggtggcctcgagatcccgggtgatcaagtcttcgtcgagtgattgtaaataaaatgtaatttacagtatagtattttaattaatatacaaatgatttgataataattcttatttaactataatatattgtgttgggttgaattaaaggtccgtatactagtatcgattcgcgacctactccggaatattaatagatcatggagataattaaaatgataaccatctcgcaaataaataagtattttactgttttcgtaacagttttgtaataaaaaaacctataaatattccggattattcataccgtcccaccatcgggcgcggatccgccaccatggaaaactggtccgctctggaactgctgcccaaggtcggaatccctaccgacttcctgacccacgtcaagacctccgctggcgaggaaatgttcgaggctctgaggatctactacggcgacgaccccgagcgttacaacatccacttcgaggctatcttcggcaccttctgcaaccgtctggaatgggtgtacttcctgacttccggcctggctgctgctgctcacgctatcaagttccacgacctgaacaagctgaccaccggcaagatgctgttccacgtgcaagtgccccgtgtggcttccggtgctggcctgcctacctcccgtcagaccaccatcatggtcaccaagtactccgagaagtcccccatcaccatccctttcgagctgtccgctgcttgcctgacttacctgcgtgaaaccttcgagggcaccatcctggacaagatcctgaacgtcgaggctatgcacaccgtgctgcgtgctctgaagaacaccgctgacgctatggaacgtggcctgatccacagcttcctccagaccctgctgaggaaggctcccccctacttcgtggtgcagaccctggtcgagaacgctaccctggctcgtcaggctctgaaccgtatccagcgctccaacatcctgcagtccttcaaggctaagatgctggctaccctgttcctgctgaaccgtacccgtgaccgtgactacgtgctgaagttcctgacccgtctggctgaggctgctaccgactccatcctcgacaaccctactacctacaccacctcctccggtgctaagatctccggtgtcatggtgtccaccgctaacgtgatgcagatcatcatgtccctgctgtcctcccacatcactaaggaaaccgtgtccgctcccgctacctacggcaacttcgtgctgtcccccgagaacgctgtgaccgctatctcctaccactctatcctggctgacttcaactcctacaaggctcacctgacctccggccagccccacctccccaacgactccctgagccaggctggtgctcactccctgacccccctgtccatggacgtgatccgtctgggcgaaaagaccgtgatcatggaaaacctgcgtcgcgtgtacaagaacaccgacaccaaggaccccctggaacgtaacgtggacctgaccttcttcttccccgtgggcctgtacctgcccgaggaccgtggttacaccaccgtcgagtccaaggtcaagctgaacgacaccgtgcgtaacgctctgcccaccaccgcttacctgctgaacagggaccgtgctgtgcaaaagatcgacttcgtggacgctctcaagaccctgtgccaccccgtgctgcacgagcctgctccatgcctgcaggctttcaccgagcgtggtcccccatccgagcccgctatgcagcgtctgctggaatgccgtttccagcaagagcccatgggtggtgctgctcgtcgtatcccccacttctaccgtgtgcgccgcgaggtgccccgtaccgtgaacgagatgaagcaggacttcgtggtcaccgacttctacaaggttggaaacatcaccctgtacaccgagctgcaccctttcttcgacttcacccactgccaagagaactccgagactgtggctctgtgcaccccccgtatcgtgatcggcaacctgcccgacggcctggctcccggtcccttccacgagctgaggacctgggagatcatggaacacatgcgcctgcgtcccccacccgactacgaggaaaccctgcgtctgttcaagaccaccgtgacctcccccaactaccccgagctgtgctacctggtggacgtgctggtgcacggcaacgctgacgctttcctgctgatccgcgctttcatcgctcgttgcatcgtgaacatgttccacacccgtcagctgctggtgttcgctcactcctacgctctggtcaccctgatcgctgagcacctggctgacggtgctctgcccccccagctcctgttccactaccgtaacctggtggctgtgctgcgcctggtcacccgtatctccgctctgcccggcctgaacaacggccagctggctgaggaacccctgtccgcttacgtgaacgctctgcacgaccacaggctgtggccccccttcgtgacccacctccctcgtaacatggaaggtgtccaggtggtggctgatcgtcagcccctgaaccccgctaacatcgaggctcgtcaccacggtgtctccgacgtgccccgtctgggtgctatggacgctgacgagcccctgttcgtggacgactaccgtgctaccgacgacgagtggaccctgcaaaaggtgttctacctgtgcctgatccccgctatgaccaacaaccgtgcttgcggcctgggcctgaacctcaagactctgctggtggacctgttctaccgtcccgccttcctgctcatgcccgctgctaccgctgtgtccacctccggcaccacctccaaggaatccacctctggtgtcacccccgaggactccgtggctgctcagcgtcaggctgtgggcgagatgctgaccgagctggtcgaggacgtggccaccgacgctcacacccctctgctgcaggcttgccgcgagctgttcctggctgtgcagttcgtgggcgagcacgtgaaggtgctggaagtgcgtgctcccctggaccacgctcagaggcagggactgcccgacttcatctcccgtcagcatgtgctgtacaacggttgctgcgtcgtgaccgctcctaagaccctgatcgagtactccctgcccgtgcccttccaccgtttctactccaaccccaccatctgcgctgctctgtccgacgacatcaagcgttacgtgaccgagttcccccactaccatagacacgatggtggtttccccctgcccaccgctttcgctcacgagtaccacaactggctgcgtagccccttctcccgttactccgctacctgccccaacgtgctgcactccgtgatgaccctggctgctatgctgtacaagatctcccccgtgtccctggtgctgcagaccaaggctcacatccaccccggtttcgctctgaccgctgtgcgtaccgacaccttcgaggtggacatgctgctgtactccggcaagtcctgcacctccgtcatcatcaacaaccccatcgtgaccaaggaagagagggacatctccaccacctaccacgtgacccagaacatcaacaccgtggacatgggcctgggttacacctccaacacttgcgtggcctacgtgaaccgcgtccgcaccgacatgggtgtccgtgtgcaggacctgttccgtgtgttccccatgaacgtgtaccgccacgatgaggtggaccgttggatcaggcacgctgctggcgtcgagcgtccccagctgctggacaccgagactatctccatgctgaccttcggttccatgtccgagcgcaacgctgctgctaccgtgcacggccagaaggctgtctgcgagctgatcctgacccctgtgactatggacgtgaactacttcaagatcaccaacaaccctcgtggtcgtgcttcctgcatgctgggcgtggacccctacgacaccgaggctgccaccaaggctatctacgaccaccgcgaggctgacgctcagaccttcgctgctacccacaacccatgggcttcccaggctggttgcctgtccgacgtcctgtacaacacccgtcaccgcgagcgtctgggctacaactccaagttctactccccctgcgctcagtacttcaacaccgaggaaatcatcgctgccaacaagaccctcttcaagaccatcgacgagtacctgctgcgcgctaaggactgcatccgtggcgacaccgacactcagtacgtgtgcgtcgagggaaccgagcagctgatcgagaacccttgccgtctgacccaagaggctctgcccatcctgtccaccaccaccctggctctgatggaaactaagctgaagggtggcgctggtgctttcgctacctccgagactcacttcggcaactacgtcgtgggagagatcatccccctgcagcagtccatgctgttcaacagctaagagctcaagcttgtcgagaagtactagaggatcataatcagccataccacatttgtagaggttttacttgctttaaaaaacctcccacacctccccctgaacctgaaacataaaatgaatgcaattgttgttgttaacttgtttattgcagcttataatggttacaaataaagcaatagcatcacaaatttcacaaataaagcatttttttcactgcattctagttgtggtttgtccaaactcatcaatgtatcttatcatgtctggatctgatcactgcttgagcctagaagatccggctgctaacaaagcccgaaaggaagctgagttggctgctgtggctagctttgtttaactttaagaaggagatacatctagaccggaatattaatagatcatggagataattaaaatgataaccatctcgcaaataaataagtattttactgttttcgtaacagttttgtaataaaaaaacctataaatattccggattattcataccgtcccaccatcgggcgcggatcccggtccgaagcgcgcggaattcaaaggcctacgtcgacgccaccatggaatcccgtggtcgtcgttgccccgagatgatctccgtgctgggtcccatctccggtcacgtcctgaaggctgtgttctcccgtggcgacacccccgtgctgccccacgaaactcgtctgctgcagaccggtatccacgtgcgtgtgtcccagccctccctgatcctggtgtcccagtacacccccgactccaccccttgccaccgcggagacaaccagctgcaggtccagcacacctacttcaccggttccgaggtcgagaacgtgtccgtgaacgtgcacaaccccaccggtcgttccatctgcccctcccaagagcccatgtccatctacgtgtacgctctgcccctgaagatgctgaacatcccctccatcaacgtgcaccactacccctccgctgctgagcgcaagcaccgtcacctccccgtggctgacgctgtgatccacgcttccggcaagcagatgtggcaggctcgtctgaccgtgtccggcctggcttggacccgtcagcagaaccagtggaaggaacccgacgtgtactacacctccgctttcgtgttccccaccaaggacgtggccctgcgtcacgtcgtgtgcgctcacgaactcgtgtgctccatggaaaacacccgtgctaccaagatgcaagtgatcggcgaccagtacgtgaaggtgtacctggaatccttctgcgaggacgtgccctccggcaagctgttcatgcacgtgaccctgggttccgacgtggaagaggacctgaccatgacccgtaacccccagcccttcatgcgtccccacgagcgtaacggtttcaccgtgctgtgccccaagaacatgatcatcaagcccggcaagatctcccacatcatgctggacgtggccttcacctcccacgagcacttcggcctgctgtgccctaagtccatccccggcctgtccatctccggcaacctgctgatgaacggccagcagatcttcctggaagtgcaggctatccgtgaaaccgtcgagctgcgtcagtacgaccctgtggctgctctgttcttcttcgacatcgacctgctgctgcagcgtggtccccagtactccgagcaccccaccttcaccagccagtaccgtatccagggcaagctggaataccgtcacacctgggaccgtcacgacgagggtgctgctcagggcgacgacgacgtgtggacctccggttccgactccgacgaggaactggtcaccaccgagcgcaagaccccccgtgtgaccggtggtggtgctatggctggtgcttccacctccgctggtcgcaagcgcaagtccgcttcctccgctaccgcttgcaccgctggtgtcatgacccgtggtcgcctgaaggctgagtccaccgtggctcccgaagaggacactgacgaggactccgacaacgagatccacaaccccgctgtgttcacctggcccccctggcaggctggtatcctggctcgtaacctggtgcccatggtggctaccgtgcagggccagaacctgaagtaccaagagttcttctgggacgccaacgacatctaccgtatcttcgctgagctggaaggcgtgtggcagcccgctgctcagcccaagcgtcgtcgtcaccgtcaggacgctctgcctggtccctgtatcgcttccacccccaagaagcaccgcggctaaaagcttgtcgagaagtactagaggatcataatcagccataccacatttgtagaggttttacttgctttaaaaaacctcccacacctccccctgaacctgaaacataaaatgaatgcaattgttgttgttaacttgtttattgcagcttataatggttacaaataaagcaatagcatcacaaatttcacaaataaagcatttttttcactgcattctagttgtggtttgtccaaactcatcaatgtatcttatcatgtctggatctgatcactgcttgagcctagaagatccggctgctaacaaagcccgaaaggaagctgagttggctgctgccaccgctgagcaataactatcataaccggaatattaatagatcatggagataattaaaatgataaccatctcgcaaataaataagtattttactgttttcgtaacagttttgtaataaaaaaacctataaatattccggattattcataccgtcccaccatcgggcgcggatcccggtccgaagcgcgcggaattcgccaccatgaccatggacgagcagcagccccaggctgtgacccccgtgtacgtgggcggtttcctggctcgttacgaccagtcccccgacgaggctgagctgctgctgccacgtgacgtggtcgaacactggctgcacgctcagggccagggacagccttccctgtccgtggctctgcccctgaacatcaaccacgacgacaccgctgtcgtgggtcacgtggccgctatgcagtccgtgcgtgacggcctgttctgcctgggttgcgtgacctccccccgtttcctggaaatcgtgcgtcgtgcttccgagaagtccgagctggtgtcccgtggtcccgtgtccccactgcagcccgacaaggtggtcgagttcctgtccggttcctacgctggcctgtccctgtcatcccgtcgttgcgacgacgtcgaggctgctacctccctgagcggctccgagactacccccttcaagcacgtggccctgtgctccgtgggtcgtaggcgtggaaccctggctgtgtacggtcgtgaccccgagtgggtcacccagcgtttccccgacctgaccgctgctgaccgtgacggactgcgtgctcagtggcagcgttgcggttccaccgctgtggacgcttccggcgaccccttccgttccgactcctacggcctgctgggcaactccgtggacgctctgtacatccgcgagcgtctgcccaagctgcgttacgacaagcagctcgtgggtgtcaccgagcgcgagtcctacgtgaaggcttccgtgtcccccgaggctgcttgcgacatcaaggctgcttccgctgagcgttctggcgacagccgctcccaggctgctactcctgctgctggtgctcgtgtgccctccagctccccatccccacctgtcgagcctccctcccccgtgcaacctcctgctctgcctgcttccccctccgtgctgcctgctgagtccagcccctccctgtcaccctctgagcctgctgaggctgcctccatgtcccaccctctgagcgctgctgtgactgctgctaccgctccccctggtgctactgtggctggtgcttcccccgctgtgccttccctggcttggcctcacgacggtgtctacctgcccaaggacgctttcttctccctgctgggcgcttcccgttccgctgctcccgtgatgtaccccggtgctgtggctgctccccccagcgcttcacctgctcctctgcccctgccctcctaccccgcttcctacggtgctcccgtcgtgggttacgaccagctggctgctcgtcacttcgctgactacgtggacccccactaccccggctggggtcgtcgttacgagcccgctccttccctgcacccatcctaccctgtgccccctcctccatcacccgcttactaccgtcgtcgtgactcccccggtggcatggacgagcctccatctggatgggagcgttacgacggttcccaccgtggccagtcccaaaagcagcaccgtcacggtggttccggtggtcacaacaagcgtcgcaaggaagccgctgctgcatcctccagctccgacgaggacctgagcttccccggcgaggctgaacacggtcgtgctcgcaagcgtctgaagtcccacgtgaactccgacggaggtagcggaggccacgctggttccaaccagcagcagcaacagcgctacgacgagctgcgtgacgctatccacgagctgaagcgtgacctgttcgctgctcgccagtcctccaccctgctgtctgctgctctgccagctgccgcttcttcctcccctaccaccaccaccgtgtgcacccctactggcgagctgacctctggtggtggcgagactcccaccgctctgctgtccggtggtgctaaggtggccgagcgtgctcaggctggtgtcgtgaacgcttcctgccgtctggctaccgcttccggttccgaggctgccaccgctggtccctctaccgctggttcctcatcctgcccagcttccgtggtgctggctgccgctgctgctcaagccgccgctgcttcacagtcccccccaaaggatatggtggacctgaaccgtcgtatcttcgtggctgctctgaacaagctcgagtaataaaagcttgtcgagaagtactagaggatcataatcagccataccacatttgtagaggttttacttgctttaaaaaacctcccacacctccccctgaacctgaaacataaaatgaatgcaattgttgttgttaacttgtttattgcagcttataatggttacaaataaagcaatagcatcacaaatttcacaaataaagcatttttttcactgcattctagttgtggtttgtccaaactcatcaatgtatcttatcatgtctggatctgatcactgcttgagcctagaagatccggctgctaacaaagcccgaaaggaagctgggaatattaatagatcatggagataattaaaatgataaccatctcgcaaataaataagtattttactgttttcgtaacagttttgtaataaaaaaacctataaatattccggattattcataccgtcccaccatcgggcgcggatccgccaccatggctgctatggaagctaacatcttctgcaccttcgaccacaagctgtctatcgctgacgtgggcaagctgaccaagctggtggctgctgtggtgcccatcccccagcgtctgcacctgatcaagcactaccagctgggcctgcaccagttcgtggaccacacccgtggttacgtgcgtctgcgtggcctgctgcgtaacatgaccctgaccctgatgcgtcgtgtcgagggcaaccagatcctgctgcacgtgcccacccacggcctgctgtacaccgtgctgaacaccggtcccgtgacctgggagaagggcgacgctctgtgcgtgctgccccccctgttccacggtcccctggctcgtgaaaacctgttgaccctgggccagtgggagctggtgctgccctggatcgtgcccatgcccctggctctggaaatcaaccagcgcctgctgatcatgggcctgttctccctggaccgttcctacgaagaagtgaaggctgctgtccagcagctgcagaccatcaccttccgtgacgctaccttcaccatccccgaccccgtgatcgaccagcacctcctgatcgacatgaagaccgcttgcctgtccatgtccatggtggctaacctggcttccgagctgaccatgacctacgtccgcaagctggctttggaggactcttccatgctgctggtcaagtgccaagagctgctgatgcgtctggaccgcgagcgttccgtgggcgagcctcgtactcccgctcgtcctcagcacgtgtcccccgacgacgagatcgctcgtctgtccgctctgttcgtgatgctgcgtcagctggacgacctgatccgcgagcaggtcgtgttcaccgtgtgcgacgtgagcccagacaacaagtccgctacctgcatcttcaagggctaaggcgcgccaagcttgtcgagaagtactagaggatcataatcagccataccacatttgtagaggttttacttgctttaaaaaacctcccacacctccccctgaacctgaaacataaaatgaatgcaattgttgttgttaacttgtttattgcagcttataatggttacaaataaagcaatagcatcacaaatttcacaaataaagcatttttttcactgcattctagttgtggtttgtccaaactcatcaatgtatcttatcatgtctggatctgatcactgcttgagcctagaagatccggctgctaacaaagcccgaaaggaagctgagttggctgctgccaccgctgagcaataactatcataacccctaggggcctctaaacgggtcttgaggggttttttgctgaaaggaggaactatatccggatctgaacaggagggacagctgatagaaacagaagccactggagcacctcaaaaacaccatcatacactaaatcagtaagttggcagcatcacccgacgcactttgcgccgaataaatacctgtgacggaagatcacttcgcagaataaataaatcctggtgtccctgttgataccgggaagccctgggccaacttttggcgaaaatgagacgttgatcggcacgtaagaggttccaactttcaccataatgaaataagatcactaccgggcgtattttttgagttatcgagattttcaggagctaaggaagctaaaatggagaaaaaaatcactggatataccaccgttgatatatcccaatggcatcgtaaagaacattttgaggcatttcagtcagttgctcaatgtacctataaccagaccgttcagctggatattacggcctttttaaagaccgtaaagaaaaataagcacaagttttatccggcctttattcacattcttgcccgcctgatgaatgctcatccggaattccgtatggcaatgaaagacggtgagctggtgatatgggatagtgttcacccttgttacaccgttttccatgagcaaactgaaacgttttcatcgctctggagtgaataccacgacgatttccggcagtttctacacatatattcgcaagatgtggcgtgttacggtgaaaacctggcctatttccctaaagggtttattgagaatatgtttttcgtctcagccaatccctgggtgagtttcaccagttttgatttaaacgtggccaatatggacaacttcttcgcccccgttttcaccatgggcaaatattatacgcaaggcgacaaggtgctgatgccgctggcgattcaggttcatcatgccgtttgtgatggcttccatgtcggcagaatgcttaatgaattacaacagtactgcgatgagtggcagggcggggcgtaatttttttaaggcagttattggtgcccttaaacgcctggttgctacgcctgaataagtgataataagcggatgaatggcagaaattcgaaagcaaattcgacccggtcgtcggttcagggcagggtcgttaaatagccgcttatgtctattgctggtttaccggtttattgactaccggaagcagtgtgaccgtgtgcttctcaaatgcctgaggccagtttgctcaggctctccccgtggaggtaataattgacgatatgatcatttattctgcctcccagctgacattcatccggggtcagcaccgtttctgcggactggctttctacgtgttccgcttcctttagcagcccttgcgccctgagtgcttgcggcagcgtgaagctaattctgtcagccgttaagtgttcctgtgtcactcaaaattgctttgagaggctctaagggcttctcagtgcgttacatccctggcttgttgtccacaaccgttaaaccttaaaagctttaaaagccttatatattcttttttttcttataaaacttaaaaccttagaggctatttaagttgctgatttatattaattttattgttcaaacatgagagcttagtacgtgaaacatgagagcttagtacgttagccatgagagcttagtacgttagccatgagggtttagttcgttaaacatgagagcttagtacgttaaacatgagagcttagtacgtgaaacatgagagcttagtacgtactatcaacaggttgaactgctgatcaacagatcctctacgcggccgcggtaccataacttcgtatagcatacattatacgaagttatctggtttaaacgtacccgtagtggctatggcagggcttgccgccccgacgttggctgcgagccctgggccttcacccgaacttgggggttggggtggggaaaaggaagaaacgcgggcgtattggtcccaatggggtctcggtggggtatcgacagagtgccagccctgggaccgaaccccgcgtttatgaacaaacgacccaacacccgtgcgttttattctgtctttttattgccgtcatagcgcgggttccttccggtattgtctccttccgtgtttcagttagcctcccccatctcccggtaccgcatgctatgcatcagctgctagcttagcgagcgtccacagcctggggaccgtaacgggagtgagcgggcaggttcacacgggtctgcttcagctcagggggcaggccagcgtagtacttgtccaggtgacgcagcaggggggggtccagctggtgacgcaggcagaattccttcacagcgttgtacaggccgtagaacagggtgataccctcgggagcagcagcggtggacacgggcagacgcacagcacggttggtacgggtagcctcgttacggatagccaccaccacgttgaacagggaggggggcaccagctcgaaacccagcacgtgttcggtgaagatggaacgaccgtaggacagacgagtcaggtcgtaaccacggcacaggtcgtccacgcaagtgtacacagcgggggaaccgtcgccgcactcggagtaaccgcgcatcacggtcatccaacggggagcggtgtcggaggacagcagggtcagcagagcacgcagctggtcggggttgttgtacagcagggccagggtgtccaggaaagcgtcgtccagcagcacggagttagcagcctcgggggtcacgggacggtaacggatcagctgggacaggggaccgtccctacgggtcacgttgaccaggggacgcagccaggactcgtacttgtcgccctggaacacctctcccagcaggcaacgacgggtcagctcggggcactcagcgggcaccttctcagccacggtgggagccacggacacggtagcggaggacacgatgggcagcagcaggcagcaccacagcagagccacgggaccgggggagaaggagaaaccgcagtcgggacgacggcacatggtggctcgagatcccgggtgatcaagtcttcgtcgagtgattgtaaataaaatgtaatttacagtatagtattttaattaatatacaaatgatttgataataattcttatttaactataatatattgtgttgggttgaattaaaggtccgtatactagtatcgattcgcgacctactccggaatattaatagatcatggagataattaaaatgataaccatctcgcaaataaataagtattttactgttttcgtaacagttttgtaataaaaaaacctataaatattccggattattcataccgtcccaccatcgggcgcggatccgccaccatgaactccaaggacctgacccccttcctgaccaccctgtggctgctgctggaccactcccgtgtgcctcgtgtgcgtgctgaggaatgctgcgaagtgatcaacgtgaaccacccccccgagcgctgctacgacttcaagatgtgcaacctgttcaccgtggctctgcgttgccccgacggcgaagtgtgctactcccccgaaaagaccgctgagatccgtggtatcgtgaccaccatgacccactccctgacccgtcaagtgatccacaacaagctgaccagctgcaactacaaccccctgtacctcgaggctgacggtcgtatccgttgcggcaaggtgtccgacaaggctcagtacctgctgggtgctgctggttccgtgccctaccgttggatcaacctcgagtacgacaagatcacccgtatcgtgggcctggaccagtacctcgagtccgtgaagaagcacaagcgtctggacgtgtgccgtgctaagatgggttacatgctgcagtaaaagcttgtcgagaagtactagaggatcataatcagccataccacatttgtagaggttttacttgctttaaaaaacctcccacacctccccctgaacctgaaacataaaatgaatgcaattgttgttgttaacttgtttattgcagcttataatggttacaaataaagcaatagcatcacaaatttcacaaataaagcatttttttcactgcattctagttgtggtttgtccaaactcatcaatgtatcttatcatgtctggatctgatcactgcttgagcctagaagatccggctgctaacaaagcccgaaaggaagctgagttggctgctgtggctagctttgtttaactttaagaaggagatacatctagaccggaatattaatagatcatggagataattaaaatgataaccatctcgcaaataaataagtattttactgttttcgtaacagttttgtaataaaaaaacctataaatattccggattattcataccgtcccaccatcgggcgcggatccgccaccatgctgcgtctgctgctgcgtcaccacttccactgcctgctgctgtgcgctgtgtgggctaccccctgcctggcttccccctggttcaccctgaccgctaaccagaacccctccccaccctggtccaagctgacctaccccaagccccacgacgctgctaccttctactgccccttcctgtacccatccccacctcgttccccatcccagttctccggtttccagcgtgtgtccaccggtcccgagtgccgtaacgagactctgtacctgctgtacaaccgcgagggccagaccctggtcgagaggtcctccacctgggtcaagaaggtcatctggtacttgtccggtcgtaaccagaccatcctgcagcgtatgccccgtaccgcttccaagccctccgacggcaacgtgcagatctccgtcgaggacgctaagatcttcggtgctcacatggtgcccaagcagaccaagctgctgcgtttcgtggtcaacgacggcacccgttaccagatgtgcgtgatgaagctggaatcctgggctcacgtgttccgtgactactccgtgtccttccaagtgcgcctgaccttcaccgaggctaacaaccagacctacaccttctgcacccaccccaacctgatcgtgtaagtcgacaagcttgtcgagaagtactagaggatcataatcagccataccacatttgtagaggttttacttgctttaaaaaacctcccacacctccccctgaacctgaaacataaaatgaatgcaattgttgttgttaacttgtttattgcagcttataatggttacaaataaagcaatagcatcacaaatttcacaaataaagcatttttttcactgcattctagttgtggtttgtccaaactcatcaatgtatcttatcatgtctggatctgatcactgcttgagcctagaagatccggctgctaacaaagcccgaaaggaagctgagttggctgctgggtgcctaatgagtgagctaactcacattaattgcccggaatattaatagatcatggagataattaaaatgataaccatctcgcaaataaataagtattttactgttttcgtaacagttttgtaataaaaaaacctataaatattccggattattcataccgtcccaccatcgggcgcggatccgccaccggatccgccaccatgcgtctgtgccgtgtgtggctgtccgtgtgcctgtgcgctgtggtgctgggacagtgccagcgtgaaaccgctgagaagaacgactactaccgtgtgccccactactgggacgcttgctcccgtgctctgcccgaccagacccgttacaagtacgtcgagcagctggtggacctgaccctgaactaccactacgacgcttcccacggcctggacaacttcgacgtgctgaagcgtatcaacgtgaccgaggtgtccctgctgatctccgacttccgtcgtcagaaccgtcgtggtggcaccaacaagcgtaccaccttcaacgctgctggttccctggctccccacgctcgttccttggagttctccgtgcgtctgttcgccaactaataaaagcttgtcgagaagtactagaggatcataatcagccataccacatttgtagaggttttacttgctttaaaaaacctcccacacctccccctgaacctgaaacataaaatgaatgcaattgttgttgttaacttgtttattgcagcttataatggttacaaataaagcaatagcatcacaaatttcacaaataaagcatttttttcactgcattctagttgtggtttgtccaaactcatcaatgtatcttatcatgtctggatctgatcactgcttgagcctagaagatccggctgctaacaaagcccgaaaggaagctgagttggctgctgccaccgctgagcaataactatcataacccccggaatattaatagatcatggagataattaaaatgataaccatctcgcaaataaataagtattttactgttttcgtaacagttttgtaataaaaaaacctataaatattccggattattcataccgtcccaccatcgggcgcggatcccggtccgaagcgcgcggaattcaaaggcctaccgtcgacgccaccatggaatcccgtatctggtgcctggtcgtgtgcgtgaacctgtgcatcgtgtgcctgggtgctgctgtgtcctcctcctccacccgtggcacctccgctacccactcccaccactcctcccacaccacctccgccgctcactcccgttccggttccgtgtcccagcgtgtgacctcctcccagaccgtgtcccacggtgtcaacgagactatctacaacaccaccctgaagtacggcgacgtcgtgggtgtcaacaccaccaagtacccctaccgtgtgtgctccatggctcagggcaccgacctgatccgtttcgagcgtaacatcgtgtgcacctccatgaagcccatcaacgaggacctggacgagggtatcatggtggtgtacaagcgcaacatcgtggctcacaccttcaaggtccgcgtgtaccagaaggtgctgaccttccgtcgttcctacgcttacatccacaccacttacctgctgggttccaacaccgagtacgtggcccctcccatgtgggagatccaccacatcaactcccactcccagtgctactcctcttactcccgtgtgatcgctggcaccgtgttcgtggcttaccaccgtgactcctacgagaacaagaccatgcagctgatgcccgacgactactccaacacccactccacccgttacgtgaccgtgaaggaccagtggcactcccgtggttccacctggctgtaccgtgaaacctgcaacctgaactgcatggtcaccatcaccaccgctcgttccaagtacccttaccacttcttcgctacctccaccggcgacgtggtggacatctcccccttctacaacggtactaaccgtaacgcttcctacttcggcgagaacgctgacaagttcttcatcttccccaactacaccatcgtgtccgacttcggtcgtcccaactccgctctggaaacccaccgtctggtggctttcttggagcgtgctgactccgtgatctcctgggacatccaggacgagaagaacgtgacctgccagctgaccttctgggaggcttccgagcgtaccatccgttccgaggctgaggactcctaccacttctccagcgctaagatgaccgctaccttcctgtccaagaaacaagaggtcaacatgtccgactccgccctggactgcgtgcgtgacgaggctatcaacaagctgcagcagatcttcaacacctcctacaaccagacctacgagaagtacggaaacgtgtccgtgttcgagactaccggtggcctggtggtgttctggcagggtatcaagcagaagtccctggtcgagctggaacgtctggctaaccgttcctccctgaacctgacccacaaccgtaccaagcgttccaccgacggcaacaacgctactcacctgtccaacatggaatccgtgcacaacctggtgtacgctcagctgcagttcacctacgacaccctgcgcggttacatcaaccgtgctctggctcagatcgctgaggcttggtgcgtggaccagcgtcgtaccctggaagtgttcaaggaactgtccaagatcaacccctccgctatcctgtccgccatctacaacaagcctatcgctgctcgtttcatgggcgacgtgctgggcctggcttcctgcgtgaccatcaaccagacttccgtgaaggtgctgcgtgacatgaacgtgaaggaatcccccggtcgttgctactcccgtcccgtggtcatcttcaacttcgctaactcctcctacgtgcagtacggccagctgggcgaggacaacgagatcctgctgggcaaccaccgtaccgaggaatgccagctgccctccctgaagatcttcatcgctggcaactccgcttacgaatacgtggactacctgttcaagcgcatgatcgacctgtcctccatctctaccgtggactccatgatcgctctggacatcgaccccctggaaaacaccgacttccgtgtgctggaactgtactcccagaaggaactgcgttccatcaacgtgttcgacctggaagagatcatgcgcgagttcaactcctacaagcagcgtgttaagtacgtcgaggacaaggtggtggaccccctgcccccctacctgaagggactggacgacctgatgtccggcctgggagctgccggcaaggctgtgggtgtcgctatcggtgctgtgggtggtgctgtggcttccgtggtcgagggtgtcgccaccttcctgaagaaccccttcggtgctttcaccatcatcctggtggctatcgctgtggtcatcatcatctacctgatctacacccgtcagcgtcgtctgtgcatgcagcccctgcagaacctgttcccctacctggtgtccgctgacggtactaccgtgacctccggcaacaccaaggacacctccctgcaggctcccccatcctacgaggaatccgtctacaactccggtcgcaagggtcccggtcccccttcctccgacgcttctaccgctgctcccccatacaccaacgagcaggcttaccagatgctgctggctctcgtgcgtctggacgctgagcagcgtgcacagcagaacggcaccgactccctggacggccagaccggaacccaggacaagggccagaagcccaacctgctggaccgtctgcgtcaccgcaagaacggttaccgtcacctgaaggactccgacgaggaagagaacgtctaaggcgcgccaagcttgtcgagaagtactagagatcataatcagccataccacatttgtagaggttttacttgctttaaaaaacctcccacacctccccctgaacctgaaacataaaatgaatgcaattgttgttgttaacttgtttattgcagcttataatggttacaaataaagcaatagcatcacaaatttcacaaataaagcatttttttcactgcattctagttgtggtttgtccaaactcatcaatgtatcttatcatgtctggatctgatcactgcttgagcctagaagatccggctgctaacaaagcccgaaaggaagctgggaatattaatagatcatggagataattaaaatgataaccatctcgcaaataaataagtattttactgttttcgtaacagttttgtaataaaaaaacctataaatattccggattattcataccgtcccaccatcgggcgcggatccgccaccatgcgtcccggcctgccctcctacctgatcgtgctggctgtgtgcctgctgtcccacctcctgtcctcccgttacggtgctgaggctatctccgagcccctggacaaggctttccacctcctgctgaacacctacggtcgtcctatccgtttcctgcgcgagaacaccacccagtgcacctacaactcctccctgcgcaactccaccgtcgtccgcgagaacgctatctccttcaacttcttccagtcctacaaccagtactacgtgttccacatgccccgttgcctgttcgctggtcccctggctgagcagttcctgaaccaggtggacctgaccgagactctcgagcgttaccagcagcgtctgaacacttacgctctggtgtccaaggacctggcttcctaccgttccttcagccagcagctgaaggctcaggactccctgggcgagcagcccaccactgtgcctccccctatcgacctgtccatcccccacgtgtggatgcccccccagaccactcctcacggctggaccgagtcccacaccacctccggactgcaccgtccccacttcaaccagacctgcatcctgttcgacggtcacgacctgctgttctccaccgtgaccccctgcctgcaccagggcttctacctcatcgacgagctgcgttacgtgaagatcaccctgaccgaggatttcttcgtggtcaccgtgtccatcgacgacgacacccccatgctgctgatcttcggtcacctcccccgtgtgctgttcaaggctccctaccagcgtgacaacttcatcctgcgtcagaccgagaagcacgagctgctggtgctggtcaagaaggaccagctgaaccgtcactcttacctgaaggaccccgacttcctggacgctgctctggacttcaactacctggacctgtccgctctgctgaggaactccttccaccgttacgctgtggacgtgctgaagtccggtcgttgccagatgctggaccgtcgtaccgtcgagatggctttcgcttacgccctggctctgttcgctgctgctcgtcaagaagaggctggcgctcaggtgtccgtgccccgtgctctggaccgtcaggctgctctgctgcagatccaagagttcatgatcacttgcctgtcccagaccccccctcgtaccaccctgctgctgtaccccaccgctgtggacctggctaagcgtgctctgtggacccccaaccagatcaccgacatcacctccctcgtgcgtctggtgtacatcctgtccaagcagaaccagcagcacctgatcccccagtgggctctgcgtcagatcgctgacttcgctctgaagctgcacaagacccacctggcttcattcctcagcgctttcgctcgccaagagctgtacctgatgggttccctggtgcactccatgctggtgcacaccaccgagcgtcgcgagatcttcatcgtggaaaccggcctgtgctccctggccgagctgtcccacttcacccagctgctggctcacccccaccacgagtacctgtccgacctgtacaccccctgctcctcttccggtcgtcgtgaccactccctggaacgtctgacccgtctgttccccgacgctaccgtgcctaccaccgtgcctgctgctctgtccatcctgtctaccatgcagccctccaccctggaaaccttccccgacctgttctgcctgcctctgggcgagtccttctccgctctgaccgtgtccgagcacgtgtcctacgtggtcaccaaccagtacctgatcaagggcatctcctaccccgtgtccaccaccgtcgtgggccagtccctgatcatcacccagaccgactcccagaccaagtgcgagctgacccgtaacatgcacaccactcactccatcaccgctgctctgaacatctccctcgagaactgcgctttctgccagtccgctctgttggagtacgacgacactcagggtgtcatcaacatcatgtacatgcacgactccgacgacgtgctgttcgctctggacccctacaacgaggtggtggtgtcctccccccgtacccactacctgatgctgctgaagaacggcaccgtgctggaagtgaccgacgtggtggtggacgctaccgaccgtctgctgatgatgtccgtgtacgctctgtccgctatcatcggcatctacctgctgtaccgtatgctgaagacctgctaaggcgccaagctttgtcgagaagtactagaggatcataatcagccataccacatttgtagaggttttacttgctttaaaaaacctcccacacctccccctgaacctgaaacataaaatgaatgcaattgttgttgttaacttgtttattgcagcttataatggttacaaataaagcaatagcatcacaaatttcacaaataaagcatttttttcactgcattctagttgtggtttgtccaaactcatcaatgtatcttatcatgtctggatctgatcactgcttgagcctagaagatccggctgctaacaaagcccgaaaggaagctgagttggctgctgccaccgctgagcaataactatcataacccctaggagatccgaaccagataagtgaaatctagttccaaactattttgtcatttttaattttcgtattagcttacgacgctacacccagttcccatctattttgtcactcttccctaaataatccttaaaaactccatttccacccctcccagttcccaactattttgtccgcccaca

SEQ ID NO: 52 - DNA, 18550 bp, Artificial Sequence
  Synthetic construct
ttgttccagtttggaacaagagtccactattaaagaacgtggactccaacgtcaaagggcgaaaaaccgtctatcagggcgatggcccactacgtgaaccatcaccctaatcaagttttttggggtcgaggtgccgtaaagcactaaatcggaaccctaaagggagcccccgatttagagcttgacggggaaagccggcgaacgtggcgagaaaggaagggaagaaagcgaaaggagcgggcgctagggcgctggcaagtgtagcggtcacgctgcgcgtaaccaccacacccgccgcgcttaatgcgccgctacagggcgcgtcgcgccattcgccattcaggctgcgcaactgttgggaagggcgatcggtgcgggcctcttcgctattacgccagctggcgaaagggggatgtgctgcaaggcgattaagttgggtaacgccagggttttcccagtcacgacgttgtaaaacgacggccagtgcatagaccagccgcgtaacctggcaaaatcggttacggttgagtaataaatggatgccctgcgtaagcgggtgtgggcggacaataaagtcttaaactgaacaaaatagatctaaactatgacaataaagtcttaaactagacagaatagttgtaaactgaaatcagtccagttatgctgtgaaaaagcatactggacttttgttatggctaaagcaaactcttcattttctgaagtgcaaattgcccgtcgtattaaagaggggcgtggccaagggcatggtaaagactatattcgcggcgttgtgacaatttaccgaacaactccgcggccgggaagccgatctcggcttgaacgaattgttaggtggcggtacttgggtcgatatcaaagtgcatcacttcttcccgtatgcccaactttgtatagagagccactgcgggatcgtcaccgtaatctgcttgcacgtagatcacataagcaccaagcgcgttggcctcatgcttgaggagattgatgagcgcggtggcaatgccctgcctccggtgctcgccggagactgcgagatcatagatatagatctcactacgcggctgctcaaacttgggcagaacgtaagccgcgagagcgccaacaaccgcttcttggtcgaaggcagcaagcgcgatgaatgtcttactacggagcaagttcccgaggtaatcggagtccggctgatgttgggagtaggtggctacgtctccgaactcacgaccgaaaagatcaagagcagcccgcatggatttgacttggtcagggccgagcctacatgtgcgaatgatgcccatacttgagccacctaactttgttttagggcgactgccctgctgcgtaacatcgttgctgctgcgtaacatcgttgctgctccataacatcaaacatcgacccacggcgtaacgcgcttgctgcttggatgcccgaggcatagactgtacaaaaaaacagtcataacaagccatgaaaaccgccactgcgccgttaccaccgctgcgttcggtcaaggttctggaccagttgcgtgagcgcatacgctacttgcattacagtttacgaaccgaacaggcttatgtcaactgggttcgtgccttcatccgtttccacggtgtgcgtcacccggcaaccttgggcagcagcgaagtcgaggcatttctgtcctggctggcgaacgagcgcaaggtttcggtctccacgcatcgtcaggcattggcggccttgctgttcttctacggcaaggtgctgtgcacggatctgcccttgcttcaggagatcggtagacctcggccgtcgcggcgcttgccggtggtgctgaccccggatgaagtggttcgcatcctcggttttctggaaggcgagcatcgtttgttcgcccaggactctagctatagttctagtggttggctacagctttgtttgtactatcaacaggttgaactgctgatcaacagatcctctacgcggccgcggtaccataacttcgtatagcatacattatacgaagttatctggtttaaacgtacccgtagtggctatggcagggcttgccgccccgacgttggctgcgagccctgggccttcacccgaacttgggggttggggtggggaaaaggaagaaacgcgggcgtattggtcccaatggggtctcggtggggtatcgacagagtgccagccctgggaccgaaccccgcgtttatgaacaaacgacccaacacccgtgcgttttattctgtctttttattgccgtcatagcgcgggttccttccggtattgtctccttccgtgtttcagttagcctcccccatctcccggtaccgcatgctatgcatcagctgctagcttactgcagccaccaccacagggagttcagggtggacaggttcacagcacgacggtgctcagggggggtcaggttgccgtaggtggaggactgcaggctgaagttacggatctcagacaggaacagcagggagtccaggtagtcccacatggggtcgatgaaggtgcgctggaaacgggtggatggggaggtgggggtggtcttgttgttgtcggaagcagtctcgttctcgacgggcatggtgtcgttgtagtacagggaggacatgtccagggtgccgtagatggtgtagggagtctcgttacggatcagcacgtgagtgttcttcatgaactcggacacagcggtacggttacggttgggcttgcagaagggctcgtcacggtaacgcagggtggtgtacacccaggtagccaggtccttcagctgagtggtcaggatagacttcatgaagttctcgtcgggacggtaaccgatggtagaggtggggatacgggtgggcacgatgggggagtaggtcacgttggtggaaacgttgaagatggtggaggtgtaggaggagtagggggtagtagtgctgacgcgggacttcttggagatggacttcacgggagcctgcttgcgcttcagcttgcgcatggtgttcttcagcttggtggagttgatgtacttgggcacacggaagatgttacgggacatagcgttgaccaggtagaaggaacgggtgcagttgcgctgagcgtaacgcagcagcagagcagccaggcccaggaagtagatagtctgggagtccacgttgaccttggaggggcccacgtacagcttggtgttccaacggggcacgttgaagaacatggggttgaaggtggtgaagttgccgcagttttcctcgccggtgttgttacgacgggacacgttcagcatctcggacaggcaggtcatggaggggatggtgccgcaagaggggggacggaaggtgatcttctggccggtgtggttgtactcggagtacacgtacttagcgggcttgcgcagctgggtggtgtggaagtcgaaccacaggtgggtgatggagtggttacggatgggaccagccaggatggagttgggggggaactgcttcatctcgacggtgatgttgtacagcttctgctggctggggaaggtgaagaacttgtagtagtcgccggtcttggaagccagctcttgcaggatacgcagcttcagctggcgttcctcttccttagccttctgggacttcacacggaaacgagccacagcgatcttgcagttgatgaagctgaacagcaggaaggtcagggacatcaggaagaacaggttgaacacgccacgcatctcgcccttgcgacccatggtggcctcgagatcccgggtgatcaagtcttcgtcgagtgattgtaaataaaatgtaatttacagtatagtattttaattaatatacaaatgatttgataataattcttatttaactataatatattgtgttgggttgaattaaaggtccgtatactagtatcgattcgcgacctactccggaatattaatagatcatggagataattaaaatgataaccatctcgcaaataaataagtattttactgttttcgtaacagttttgtaataaaaaaacctataaatattccggattattcataccgtcccaccatcgggcgcggatccgccaccatggaaaactggtccgctctggaactgctgcccaaggtcggaatccctaccgacttcctgacccacgtcaagacctccgctggcgaggaaatgttcgaggctctgaggatctactacggcgacgaccccgagcgttacaacatccacttcgaggctatcttcggcaccttctgcaaccgtctggaatgggtgtacttcctgacttccggcctggctgctgctgctcacgctatcaagttccacgacctgaacaagctgaccaccggcaagatgctgttccacgtgcaagtgccccgtgtggcttccggtgctggcctgcctacctcccgtcagaccaccatcatggtcaccaagtactccgagaagtcccccatcaccatccctttcgagctgtccgctgcttgcctgacttacctgcgtgaaaccttcgagggcaccatcctggacaagatcctgaacgtcgaggctatgcacaccgtgctgcgtgctctgaagaacaccgctgacgctatggaacgtggcctgatccacagcttcctccagaccctgctgaggaaggctcccccctacttcgtggtgcagaccctggtcgagaacgctaccctggctcgtcaggctctgaaccgtatccagcgctccaacatcctgcagtccttcaaggctaagatgctggctaccctgttcctgctgaaccgtacccgtgaccgtgactacgtgctgaagttcctgacccgtctggctgaggctgctaccgactccatcctcgacaaccctactacctacaccacctcctccggtgctaagatctccggtgtcatggtgtccaccgctaacgtgatgcagatcatcatgtccctgctgtcctcccacatcactaaggaaaccgtgtccgctcccgctacctacggcaacttcgtgctgtcccccgagaacgctgtgaccgctatctcctaccactctatcctggctgacttcaactcctacaaggctcacctgacctccggccagccccacctccccaacgactccctgagccaggctggtgctcactccctgacccccctgtccatggacgtgatccgtctgggcgaaaagaccgtgatcatggaaaacctgcgtcgcgtgtacaagaacaccgacaccaaggaccccctggaacgtaacgtggacctgaccttcttcttccccgtgggcctgtacctgcccgaggaccgtggttacaccaccgtcgagtccaaggtcaagctgaacgacaccgtgcgtaacgctctgcccaccaccgcttacctgctgaacagggaccgtgctgtgcaaaagatcgacttcgtggacgctctcaagaccctgtgccaccccgtgctgcacgagcctgctccatgcctgcaggctttcaccgagcgtggtcccccatccgagcccgctatgcagcgtctgctggaatgccgtttccagcaagagcccatgggtggtgctgctcgtcgtatcccccacttctaccgtgtgcgccgcgaggtgccccgtaccgtgaacgagatgaagcaggacttcgtggtcaccgacttctacaaggttggaaacatcaccctgtacaccgagctgcaccctttcttcgacttcacccactgccaagagaactccgagactgtggctctgtgcaccccccgtatcgtgatcggcaacctgcccgacggcctggctcccggtcccttccacgagctgaggacctgggagatcatggaacacatgcgcctgcgtcccccacccgactacgaggaaaccctgcgtctgttcaagaccaccgtgacctcccccaactaccccgagctgtgctacctggtggacgtgctggtgcacggcaacgctgacgctttcctgctgatccgcgctttcatcgctcgttgcatcgtgaacatgttccacacccgtcagctgctggtgttcgctcactcctacgctctggtcaccctgatcgctgagcacctggctgacggtgctctgcccccccagctcctgttccactaccgtaacctggtggctgtgctgcgcctggtcacccgtatctccgctctgcccggcctgaacaacggccagctggctgaggaacccctgtccgcttacgtgaacgctctgcacgaccacaggctgtggccccccttcgtgacccacctccctcgtaacatggaaggtgtccaggtggtggctgatcgtcagcccctgaaccccgctaacatcgaggctcgtcaccacggtgtctccgacgtgccccgtctgggtgctatggacgctgacgagcccctgttcgtggacgactaccgtgctaccgacgacgagtggaccctgcaaaaggtgttctacctgtgcctgatccccgctatgaccaacaaccgtgcttgcggcctgggcctgaacctcaagactctgctggtggacctgttctaccgtcccgccttcctgctcatgcccgctgctaccgctgtgtccacctccggcaccacctccaaggaatccacctctggtgtcacccccgaggactccgtggctgctcagcgtcaggctgtgggcgagatgctgaccgagctggtcgaggacgtggccaccgacgctcacacccctctgctgcaggcttgccgcgagctgttcctggctgtgcagttcgtgggcgagcacgtgaaggtgctggaagtgcgtgctcccctggaccacgctcagaggcagggactgcccgacttcatctcccgtcagcatgtgctgtacaacggttgctgcgtcgtgaccgctcctaagaccctgatcgagtactccctgcccgtgcccttccaccgtttctactccaaccccaccatctgcgctgctctgtccgacgacatcaagcgttacgtgaccgagttcccccactaccatagacacgatggtggtttccccctgcccaccgctttcgctcacgagtaccacaactggctgcgtagccccttctcccgttactccgctacctgccccaacgtgctgcactccgtgatgaccctggctgctatgctgtacaagatctcccccgtgtccctggtgctgcagaccaaggctcacatccaccccggtttcgctctgaccgctgtgcgtaccgacaccttcgaggtggacatgctgctgtactccggcaagtcctgcacctccgtcatcatcaacaaccccatcgtgaccaaggaagagagggacatctccaccacctaccacgtgacccagaacatcaacaccgtggacatgggcctgggttacacctccaacacttgcgtggcctacgtgaaccgcgtccgcaccgacatgggtgtccgtgtgcaggacctgttccgtgtgttccccatgaacgtgtaccgccacgatgaggtggaccgttggatcaggcacgctgctggcgtcgagcgtccccagctgctggacaccgagactatctccatgctgaccttcggttccatgtccgagcgcaacgctgctgctaccgtgcacggccagaaggctgtctgcgagctgatcctgacccctgtgactatggacgtgaactacttcaagatcaccaacaaccctcgtggtcgtgcttcctgcatgctgggcgtggacccctacgacaccgaggctgccaccaaggctatctacgaccaccgcgaggctgacgctcagaccttcgctgctacccacaacccatgggcttcccaggctggttgcctgtccgacgtcctgtacaacacccgtcaccgcgagcgtctgggctacaactccaagttctactccccctgcgctcagtacttcaacaccgaggaaatcatcgctgccaacaagaccctcttcaagaccatcgacgagtacctgctgcgcgctaaggactgcatccgtggcgacaccgacactcagtacgtgtgcgtcgagggaaccgagcagctgatcgagaacccttgccgtctgacccaagaggctctgcccatcctgtccaccaccaccctggctctgatggaaactaagctgaagggtggcgctggtgctttcgctacctccgagactcacttcggcaactacgtcgtgggagagatcatccccctgcagcagtccatgctgttcaacagctaagagctcaagcttgtcgagaagtactagaggatcataatcagccataccacatttgtagaggttttacttgctttaaaaaacctcccacacctccccctgaacctgaaacataaaatgaatgcaattgttgttgttaacttgtttattgcagcttataatggttacaaataaagcaatagcatcacaaatttcacaaataaagcatttttttcactgcattctagttgtggtttgtccaaactcatcaatgtatcttatcatgtctggatctgatcactgcttgagcctagaagatccggctgctaacaaagcccgaaaggaagctgagttggctgctgcccaccgctgagcaataactatcataacccccggaatattaatagatcatggagataattaaaatgataaccatctcgcaaataaataagtattttactgttttcgtaacagttttgtaataaaaaaacctataaatattccggattattcataccgtcccaccatcgggcgcggatccgccaccatggctgctatggaagctaacatcttctgcaccttcgaccacaagctgtctatcgctgacgtgggcaagctgaccaagctggtggctgctgtggtgcccatcccccagcgtctgcacctgatcaagcactaccagctgggcctgcaccagttcgtggaccacacccgtggttacgtgcgtctgcgtggcctgctgcgtaacatgaccctgaccctgatgcgtcgtgtcgagggcaaccagatcctgctgcacgtgcccacccacggcctgctgtacaccgtgctgaacaccggtcccgtgacctgggagaagggcgacgctctgtgcgtgctgccccccctgttccacggtcccctggctcgtgaaaacctgttgaccctgggccagtgggagctggtgctgccctggatcgtgcccatgcccctggctctggaaatcaaccagcgcctgctgatcatgggcctgttctccctggaccgttcctacgaagaagtgaaggctgctgtccagcagctgcagaccatcaccttccgtgacgctaccttcaccatccccgaccccgtgatcgaccagcacctcctgatcgacatgaagaccgcttgcctgtccatgtccatggtggctaacctggcttccgagctgaccatgacctacgtccgcaagctggctttggaggactcttccatgctgctggtcaagtgccaagagctgctgatgcgtctggaccgcgagcgttccgtgggcgagcctcgtactcccgctcgtcctcagcacgtgtcccccgacgacgagatcgctcgtctgtccgctctgttcgtgatgctgcgtcagctggacgacctgatccgcgagcaggtcgtgttcaccgtgtgcgacgtgagcccagacaacaagtccgctacctgcatcttcaagggctaaggcgcgccaagcttgtcgagaagtactagaggatcataatcagccataccacatttgtagaggttttacttgctttaaaaaacctcccacacctccccctgaacctgaaacataaaatgaatgcaattgttgttgttaacttgtttattgcagcttataatggttacaaataaagcaatagcatcacaaatttcacaaataaagcatttttttcactgcattctagttgtggtttgtccaaactcatcaatgtatcttatcatgtctggatctgatcactgcttgagcctagaagatccggctgctaacaaagcccgaaaggaagctgagttggctgctgccaccgctgagcaataactatcataacccccggaatattaatagatcatggagataattaaaatgataaccatctcgcaaataaataagtattttactgttttcgtaacagttttgtaataaaaaaacctataaatattccggattattcataccgtcccaccatcgggcgcggatcccggtccgaagcgcgcggaattcaaaggcctgccaccatggaaatgaacaaggtgctgcatcaggatctggtgcaggctacccgtcgtatcctgaagctgggcccctccgagctgcgtgtgaccgacgctggcctgatctgcaagaaccccaactactccgtgtgcgacgctatgctcaagaccgacaccgtgtactgcgtcgagtacctgctgtcctactgggagtcccgtaccgaccacgtgccctgcttcatcttcaagaacaccggttgcgctgtgtccctgtgctgcttcgtgcgtgctcccgtgaagctggtgtcccctgctcgtcacgtgggcgagttcaacgtgctgaaggtcaacgagtccctgatcgtgaccctgaaggacatcgaggaaatcaagccctccgcttacggtgtcctgactaagtgcgtcgtccgcaagtccaactccgcttccgtgttcaacatcgagctgatcgctttcggtcccgagaacgagggcgagtacgagaacctgctgcgcgagctgtacgctaagaaggctgcttccacctccctggctgtgcgtaaccacgtgaccgtgtcctcccactccggttccggtccctccctgtggcgtgctcgtatgtccgctgctctgacccgtaccgctggcaagcgctcctccaggactgctagccctccaccaccacctcctcgtcaccctagctgctctcccactatggtggctgctggtggagctgctgctggtcctagacctccccctcctcctatggctgctggatcctggcgtctgtgccgttgcgaggcttgcatgggccgttgcggttgcgcttccgagggcgacgctgacgaggaagaggaagagttgctggctctggctggcgagggcaaggctgctgctgccgctgccggtcaagacgtcggtggttccgctcgtcgtcccctcgaggaacacgtgtcccgtcgtcgtggtgtctccacccaccaccgtcaccccccttccccaccttgcgctccctccctggaacgtaccggttaccgttgggctccttcctcctggtggcgcgctcgttctggtccttcccgtccccagtccggtccctggctgcctgctcgtttcgctaccctgggtcccctggtcctggctctgctgttggtgctggccctgctgtggcgtggtcacggtcaatcccccagccccacccgttccgctcaccgtgactaaaagcttgtcgagaagtactagaggatcataatcagccataccacatttgtagaggttttacttgctttaaaaaacctcccacacctccccctgaacctgaaacataaaatgaatgcaattgttgttgttaacttgtttattgcagcttataatggttacaaataaagcaatagcatcacaaatttcacaaataaagcatttttttcactgcattctagttgtggtttgtccaaactcatcaatgtatcttatcatgtctggatctgatcactgcttgagcctagaagatccggctgctaacaaagcccgaaaggaagctgagttggctgctgtggctagctttgtttaactttaagaaggagatacatctagaaatattaatagatcatggagataattaaaatgataaccatctcgcaaataaataagtattttactgttttcgtaacagttttgtaataaaaaaacctataaatattccggattattcataccgtcccaccatcgggcgcggatcccggtccgaagcgcgcggaattcaaaggcctacgtcgacgccaccatgtccaacaccgctcccggtcccaccgtggctaacaagcgtgacgagaagcaccgtcacgtggtcaacgtggtgctcgagctgcccaccgagatctccgaggctacccaccccgtgctggctaccatgctgtccaagtacacccgtatgtcctccctgttcaacgacaagtgcgctttcaagctggacctgctgcgtatggtggctgtgtcccgtacccgtcgctaaaagcttgtcgagaagtactagaggatcataatcagccataccacatttgtagaggttttacttgctttaaaaaacctcccacacctccccctgaacctgaaacataaaatgaatgcaattgttgttgttaacttgtttattgcagcttataatggttacaaataaagcaatagcatcacaaatttcacaaataaagcatttttttcactgcattctagttgtggtttgtccaaactcatcaatgtatcttatcatgtctggatctgatcactgcttgagcctagaagatccggctgctaacaaagcccgaaaggaagctgagttggctgctgggtgcctaatgagtgagctaactcacattaattgcccggaatattaatagatcatggagataattaaaatgataaccatctcgcaaataaataagtattttactgttttcgtaacagttttgtaataaaaaaacctataaatattccggattattcataccgtcccaccatcgggcgcggatcccggtccgaagcgcgcggaattcgccaccatggacgctcgtgctgtggctaagcgtccccgtgaccccgctgacgaggacaacgagctggtcaccgctctgaaggctaagcgtgaagtgaacaccatctccgtgcgttacctgtaccacgctgaccaccaggctctgaccgctcgtttcttcgtgcccgagggcctggtcgagttcgaggctcagcccggtgctctgctgatccgtatggaaaccggttgcgactccccccgtcacctgtacatctccctgtacctgctgggtatccgtgcttccaacgtgtccgcttccacccgttgcctgctcgagtccgtgtacaccgcttccgctgctcgtgctgctctgcagtggctggacctgggtccccacctcctgcaccgtcgtctggaaaccctgggttgcgtcaagaccgtgtccctgggtatcacctccctgctgacctgcgtgatgcgcggctacctgtacaacaccctcaagaccgaggtgttcgctctgatgatccccaaggacatgtacctgacctgggaggaaacccgcggtcgtctgcagtacgtgtacctgatcatcgtgtacgactacgacggtcccgagactcgtcccggtatctacgtgctgacctcctctatcgctcactggcagaccctggtggacgtggcccgtggaaagttcgctcgtgaacgctgctccttcgtgaaccgtcgtatcacccgtccccgtcagatccccctgtgcaccggtgtcatccaaaagctgggctggtgcctggctgacgacatccacacctcattcctcgtgcacaaggaactgaagctgtccgtcgtgcgtctggacaacttctccgtcgagctgggcgacttccgcgagttcgtgcagctgttgaattttgaccttcttaagcttgcgggagacgtcgagtccaaccctgggcccatggaatcccgtggtcgtcgttgccccgagatgatctccgtgctgggtcccatctccggtcacgtcctgaaggctgtgttctcccgtggcgacacccccgtgctgccccacgaaactcgtctgctgcagaccggtatccacgtgcgtgtgtcccagccctccctgatcctggtgtcccagtacacccccgactccaccccttgccaccgcggagacaaccagctgcaggtccagcacacctacttcaccggttccgaggtcgagaacgtgtccgtgaacgtgcacaaccccaccggtcgttccatctgcccctcccaagagcccatgtccatctacgtgtacgctctgcccctgaagatgctgaacatcccctccatcaacgtgcaccactacccctccgctgctgagcgcaagcaccgtcacctccccgtggctgacgctgtgatccacgcttccggcaagcagatgtggcaggctcgtctgaccgtgtccggcctggcttggacccgtcagcagaaccagtggaaggaacccgacgtgtactacacctccgctttcgtgttccccaccaaggacgtggccctgcgtcacgtcgtgtgcgctcacgaactcgtgtgctccatggaaaacacccgtgctaccaagatgcaagtgatcggcgaccagtacgtgaaggtgtacctggaatccttctgcgaggacgtgccctccggcaagctgttcatgcacgtgaccctgggttccgacgtggaagaggacctgaccatgacccgtaacccccagcccttcatgcgtccccacgagcgtaacggtttcaccgtgctgtgccccaagaacatgatcatcaagcccggcaagatctcccacatcatgctggacgtggccttcacctcccacgagcacttcggcctgctgtgccctaagtccatccccggcctgtccatctccggcaacctgctgatgaacggccagcagatcttcctggaagtgcaggctatccgtgaaaccgtcgagctgcgtcagtacgaccctgtggctgctctgttcttcttcgacatcgacctgctgctgcagcgtggtccccagtactccgagcaccccaccttcaccagccagtaccgtatccagggcaagctggaataccgtcacacctgggaccgtcacgacgagggtgctgctcagggcgacgacgacgtgtggacctccggttccgactccgacgaggaactggtcaccaccgagcgcaagaccccccgtgtgaccggtggtggtgctatggctggtgcttccacctccgctggtcgcaagcgcaagtccgcttcctccgctaccgcttgcaccgctggtgtcatgacccgtggtcgcctgaaggctgagtccaccgtggctcccgaagaggacactgacgaggactccgacaacgagatccacaaccccgctgtgttcacctggcccccctggcaggctggtatcctggctcgtaacctggtgcccatggtggctaccgtgcagggccagaacctgaagtaccaagagttcttctgggacgccaacgacatctaccgtatcttcgctgagctggaaggcgtgtggcagcccgctgctcagcccaagcgtcgtcgtcaccgtcaggacgctctgcctggtccctgtatcgcttccacccccaagaagcaccgcggctaaaagcttgtcgagaagtactagaggatcataatcagccataccacatttgtagaggttttacttgctttaaaaaacctcccacacctccccctgaacctgaaacataaaatgaatgcaattgttgttgttaacttgtttattgcagcttataatggttacaaataaagcaatagcatcacaaatttcacaaataaagcatttttttcactgcattctagttgtggtttgtccaaactcatcaatgtatcttatcatgtctggatctgatcactgcttgagcctagaagatccggctgctaacaaagcccgaaaggaagctgagttggctgctgtggctagctttgtttaactttaagaaggagatacatctagacctgcaggccggaatattaatagatcatggagataattaaaatgataaccatctcgcaaataaataagtattttactgttttcgtaacagttttgtaataaaaaaacctataaatattccggattattcataccgtcccaccatcgggcgcggatcccggtccgaagcgcgcggaattcgccaccatgaccatggacgagcagcagccccaggctgtgacccccgtgtacgtgggcggtttcctggctcgttacgaccagtcccccgacgaggctgagctgctgctgccacgtgacgtggtcgaacactggctgcacgctcagggccagggacagccttccctgtccgtggctctgcccctgaacatcaaccacgacgacaccgctgtcgtgggtcacgtggccgctatgcagtccgtgcgtgacggcctgttctgcctgggttgcgtgacctccccccgtttcctggaaatcgtgcgtcgtgcttccgagaagtccgagctggtgtcccgtggtcccgtgtccccactgcagcccgacaaggtggtcgagttcctgtccggttcctacgctggcctgtccctgtcatcccgtcgttgcgacgacgtcgaggctgctacctccctgagcggctccgagactacccccttcaagcacgtggccctgtgctccgtgggtcgtaggcgtggaaccctggctgtgtacggtcgtgaccccgagtgggtcacccagcgtttccccgacctgaccgctgctgaccgtgacggactgcgtgctcagtggcagcgttgcggttccaccgctgtggacgcttccggcgaccccttccgttccgactcctacggcctgctgggcaactccgtggacgctctgtacatccgcgagcgtctgcccaagctgcgttacgacaagcagctcgtgggtgtcaccgagcgcgagtcctacgtgaaggcttccgtgtcccccgaggctgcttgcgacatcaaggctgcttccgctgagcgttctggcgacagccgctcccaggctgctactcctgctgctggtgctcgtgtgccctccagctccccatccccacctgtcgagcctccctcccccgtgcaacctcctgctctgcctgcttccccctccgtgctgcctgctgagtccagcccctccctgtcaccctctgagcctgctgaggctgcctccatgtcccaccctctgagcgctgctgtgactgctgctaccgctccccctggtgctactgtggctggtgcttcccccgctgtgccttccctggcttggcctcacgacggtgtctacctgcccaaggacgctttcttctccctgctgggcgcttcccgttccgctgctcccgtgatgtaccccggtgctgtggctgctccccccagcgcttcacctgctcctctgcccctgccctcctaccccgcttcctacggtgctcccgtcgtgggttacgaccagctggctgctcgtcacttcgctgactacgtggacccccactaccccggctggggtcgtcgttacgagcccgctccttccctgcacccatcctaccctgtgccccctcctccatcacccgcttactaccgtcgtcgtgactcccccggtggcatggacgagcctccatctggatgggagcgttacgacggttcccaccgtggccagtcccaaaagcagcaccgtcacggtggttccggtggtcacaacaagcgtcgcaaggaagccgctgctgcatcctccagctccgacgaggacctgagcttccccggcgaggctgaacacggtcgtgctcgcaagcgtctgaagtcccacgtgaactccgacggaggtagcggaggccacgctggttccaaccagcagcagcaacagcgctacgacgagctgcgtgacgctatccacgagctgaagcgtgacctgttcgctgctcgccagtcctccaccctgctgtctgctgctctgccagctgccgcttcttcctcccctaccaccaccaccgtgtgcacccctactggcgagctgacctctggtggtggcgagactcccaccgctctgctgtccggtggtgctaaggtggccgagcgtgctcaggctggtgtcgtgaacgcttcctgccgtctggctaccgcttccggttccgaggctgccaccgctggtccctctaccgctggttcctcatcctgcccagcttccgtggtgctggctgccgctgctgctcaagccgccgctgcttcacagtcccccccaaaggatatggtggacctgaaccgtcgtatcttcgtggctgctctgaacaagctcgagtaataaaagcttgtcgagaagtactagaggatcataatcagccataccacatttgtagaggttttacttgctttaaaaaacctcccacacctccccctgaacctgaaacataaaatgaatgcaattgttgttgttaacttgtttattgcagcttataatggttacaaataaagcaatagcatcacaaatttcacaaataaagcatttttttcactgcattctagttgtggtttgtccaaactcatcaatgtatcttatcatgtctggatctgatcactgcttgagcctagaagatccggctgctaacaaagcccgaaaggaagctgagttggctgctgccaccgctgagcaataactatcataacccctaggagatccgaaccagataagtgaaatctagttccaaactattttgtcatttttaattttcgtattagcttacgacgctacacccagttcccatctattttgtcactcttccctaaataatccttaaaaactccatttccacccctcccagttcccaactattttgtccgcccaca

SEQ ID NO: 53 - DNA, 30872 bp, Artificial Sequence
  Synthetic construct
ttgttccagtttggaacaagagtccactattaaagaacgtggactccaacgtcaaagggcgaaaaaccgtctatcagggcgatggcccactacgtgaaccatcaccctaatcaagttttttggggtcgaggtgccgtaaagcactaaatcggaaccctaaagggagcccccgatttagagcttgacggggaaagccggcgaacgtggcgagaaaggaagggaagaaagcgaaaggagcgggcgctagggcgctggcaagtgtagcggtcacgctgcgcgtaaccaccacacccgccgcgcttaatgcgccgctacagggcgcgtccattcgccattcaggctgcgcaactgttgggaagggcgatcggtgcgggcctcttcgctattacgccagctggcgaaagggggatgtgctgcaaggcgattaagttgggtaacgccagggttttcccagtcacgacgttgtaaaacgacggccagtgcatagaccagccgcgtaacctggcaaaatcggttacggttgagtaataaatggatgccctgcgtaagcgggtgtgggcggacaataaagtcttaaactgaacaaaatagatctaaactatgacaataaagtcttaaactagacagaatagttgtaaactgaaatcagtccagttatgctgtgaaaaagcatactggacttttgttatggctaaagcaaactcttcattttctgaagtgcaaattgcccgtcgtattaaagaggggcgtggccaagggcatggtaaagactatattcgcggcgttgtgacaatttaccgaacaactccgcggccgggaagccgatctcggcttgaacgaattgttaggtggcggtacttgggtcgatatcaaagtgcatcacttcttcccgtatgcccaactttgtatagagagccactgcgggatcgtcaccgtaatctgcttgcacgtagatcacataagcaccaagcgcgttggcctcatgcttgaggagattgatgagcgcggtggcaatgccctgcctccggtgctcgccggagactgcgagatcatagatatagatctcactacgcggctgctcaaacttgggcagaacgtaagccgcgagagcgccaacaaccgcttcttggtcgaaggcagcaagcgcgatgaatgtcttactacggagcaagttcccgaggtaatcggagtccggctgatgttgggagtaggtggctacgtctccgaactcacgaccgaaaagatcaagagcagcccgcatggatttgacttggtcagggccgagcctacatgtgcgaatgatgcccatacttgagccacctaactttgttttagggcgactgccctgctgcgtaacatcgttgctgctgcgtaacatcgttgctgctccataacatcaaacatcgacccacggcgtaacgcgcttgctgcttggatgcccgaggcatagactgtacaaaaaaacagtcataacaagccatgaaaaccgccactgcgccgttaccaccgctgcgttcggtcaaggttctggaccagttgcgtgagcgcatacgctacttgcattacagtttacgaaccgaacaggcttatgtcaactgggtttgtgccttcatccgtttccacggtgtgcgtcacccggcaaccttgggcagcagcgaagtcgaggcatttctgtcctggctggcgaacgagcgcaaggtttcggtctccacgcatcgtcaggcattggcggccttgctgttcttctacggcaaggtgctgtgcacggatctgcccttgcttcaggagatcggtagacctcggccgtcgcggcgcttgccggtggtgctgaccccggatgaagtggttcgcatcctcggttttctggaaggcgagcatcgtttgttcgcccaggactctagctatagttctagtggttggctacagctttgtttgtactatcaacaggttgaactgctgatcaacagatcctctacgcggccgcggtaccataacttcgtatagcatacattatacgaagttatctggtttaaacgtacccgtagtggctatggcagggcttgccgccccgacgttggctgcgagccctgggccttcacccgaacttgggggttggggtggggaaaaggaagaaacgcgggcgtattggtcccaatggggtctcggtggggtatcgacagagtgccagccctgggaccgaaccccgcgtttatgaacaaacgacccaacacccgtgcgttttattctgtctttttattgccgtcatagcgcgggttccttccggtattgtctccttccgtgtttcagttagcctcccccatctcccggtaccgcatgctatgcatcagctgctagcttactgcagccaccaccacagggagttcagggtggacaggttcacagcacgacggtgctcagggggggtcaggttgccgtaggtggaggactgcaggctgaagttacggatctcagacaggaacagcagggagtccaggtagtcccacatggggtcgatgaaggtgcgctggaaacgggtggatggggaggtgggggtggtcttgttgttgtcggaagcagtctcgttctcgacgggcatggtgtcgttgtagtacagggaggacatgtccagggtgccgtagatggtgtagggagtctcgttacggatcagcacgtgagtgttcttcatgaactcggacacagcggtacggttacggttgggcttgcagaagggctcgtcacggtaacgcagggtggtgtacacccaggtagccaggtccttcagctgagtggtcaggatagacttcatgaagttctcgtcgggacggtaaccgatggtagaggtggggatacgggtgggcacgatgggggagtaggtcacgttggtggaaacgttgaagatggtggaggtgtaggaggagtagggggtagtagtgctgacgcgggacttcttggagatggacttcacgggagcctgcttgcgcttcagcttgcgcatggtgttcttcagcttggtggagttgatgtacttgggcacacggaagatgttacgggacatagcgttgaccaggtagaaggaacgggtgcagttgcgctgagcgtaacgcagcagcagagcagccaggcccaggaagtagatagtctgggagtccacgttgaccttggaggggcccacgtacagcttggtgttccaacggggcacgttgaagaacatggggttgaaggtggtgaagttgccgcagttttcctcgccggtgttgttacgacgggacacgttcagcatctcggacaggcaggtcatggaggggatggtgccgcaagaggggggacggaaggtgatcttctggccggtgtggttgtactcggagtacacgtacttagcgggcttgcgcagctgggtggtgtggaagtcgaaccacaggtgggtgatggagtggttacggatgggaccagccaggatggagttgggggggaactgcttcatctcgacggtgatgttgtacagcttctgctggctggggaaggtgaagaacttgtagtagtcgccggtcttggaagccagctcttgcaggatacgcagcttcagctggcgttcctcttccttagccttctgggacttcacacggaaacgagccacagcgatcttgcagttgatgaagctgaacagcaggaaggtcagggacatcaggaagaacaggttgaacacgccacgcatctcgcccttgcgacccatggtggcctcgagatcccgggtgatcaagtcttcgtcgagtgattgtaaataaaatgtaatttacagtatagtattttaattaatatacaaatgatttgataataattcttatttaactataatatattgtgttgggttgaattaaaggtccgtatactagtatcgattcgcgacctactccggaatattaatagatcatggagataattaaaatgataaccatctcgcaaataaataagtattttactgttttcgtaacagttttgtaataaaaaaacctataaatattccggattattcataccgtcccaccatcgggcgcggatccgccaccatggaaaactggtccgctctggaactgctgcccaaggtcggaatccctaccgacttcctgacccacgtcaagacctccgctggcgaggaaatgttcgaggctctgaggatctactacggcgacgaccccgagcgttacaacatccacttcgaggctatcttcggcaccttctgcaaccgtctggaatgggtgtacttcctgacttccggcctggctgctgctgctcacgctatcaagttccacgacctgaacaagctgaccaccggcaagatgctgttccacgtgcaagtgccccgtgtggcttccggtgctggcctgcctacctcccgtcagaccaccatcatggtcaccaagtactccgagaagtcccccatcaccatccctttcgagctgtccgctgcttgcctgacttacctgcgtgaaaccttcgagggcaccatcctggacaagatcctgaacgtcgaggctatgcacaccgtgctgcgtgctctgaagaacaccgctgacgctatggaacgtggcctgatccacagcttcctccagaccctgctgaggaaggctcccccctacttcgtggtgcagaccctggtcgagaacgctaccctggctcgtcaggctctgaaccgtatccagcgctccaacatcctgcagtccttcaaggctaagatgctggctaccctgttcctgctgaaccgtacccgtgaccgtgactacgtgctgaagttcctgacccgtctggctgaggctgctaccgactccatcctcgacaaccctactacctacaccacctcctccggtgctaagatctccggtgtcatggtgtccaccgctaacgtgatgcagatcatcatgtccctgctgtcctcccacatcactaaggaaaccgtgtccgctcccgctacctacggcaacttcgtgctgtcccccgagaacgctgtgaccgctatctcctaccactctatcctggctgacttcaactcctacaaggctcacctgacctccggccagccccacctccccaacgactccctgagccaggctggtgctcactccctgacccccctgtccatggacgtgatccgtctgggcgaaaagaccgtgatcatggaaaacctgcgtcgcgtgtacaagaacaccgacaccaaggaccccctggaacgtaacgtggacctgaccttcttcttccccgtgggcctgtacctgcccgaggaccgtggttacaccaccgtcgagtccaaggtcaagctgaacgacaccgtgcgtaacgctctgcccaccaccgcttacctgctgaacagggaccgtgctgtgcaaaagatcgacttcgtggacgctctcaagaccctgtgccaccccgtgctgcacgagcctgctccatgcctgcaggctttcaccgagcgtggtcccccatccgagcccgctatgcagcgtctgctggaatgccgtttccagcaagagcccatgggtggtgctgctcgtcgtatcccccacttctaccgtgtgcgccgcgaggtgccccgtaccgtgaacgagatgaagcaggacttcgtggtcaccgacttctacaaggttggaaacatcaccctgtacaccgagctgcaccctttcttcgacttcacccactgccaagagaactccgagactgtggctctgtgcaccccccgtatcgtgatcggcaacctgcccgacggcctggctcccggtcccttccacgagctgaggacctgggagatcatggaacacatgcgcctgcgtcccccacccgactacgaggaaaccctgcgtctgttcaagaccaccgtgacctcccccaactaccccgagctgtgctacctggtggacgtgctggtgcacggcaacgctgacgctttcctgctgatccgcgctttcatcgctcgttgcatcgtgaacatgttccacacccgtcagctgctggtgttcgctcactcctacgctctggtcaccctgatcgctgagcacctggctgacggtgctctgcccccccagctcctgttccactaccgtaacctggtggctgtgctgcgcctggtcacccgtatctccgctctgcccggcctgaacaacggccagctggctgaggaacccctgtccgcttacgtgaacgctctgcacgaccacaggctgtggccccccttcgtgacccacctccctcgtaacatggaaggtgtccaggtggtggctgatcgtcagcccctgaaccccgctaacatcgaggctcgtcaccacggtgtctccgacgtgccccgtctgggtgctatggacgctgacgagcccctgttcgtggacgactaccgtgctaccgacgacgagtggaccctgcaaaaggtgttctacctgtgcctgatccccgctatgaccaacaaccgtgcttgcggcctgggcctgaacctcaagactctgctggtggacctgttctaccgtcccgccttcctgctcatgcccgctgctaccgctgtgtccacctccggcaccacctccaaggaatccacctctggtgtcacccccgaggactccgtggctgctcagcgtcaggctgtgggcgagatgctgaccgagctggtcgaggacgtggccaccgacgctcacacccctctgctgcaggcttgccgcgagctgttcctggctgtgcagttcgtgggcgagcacgtgaaggtgctggaagtgcgtgctcccctggaccacgctcagaggcagggactgcccgacttcatctcccgtcagcatgtgctgtacaacggttgctgcgtcgtgaccgctcctaagaccctgatcgagtactccctgcccgtgcccttccaccgtttctactccaaccccaccatctgcgctgctctgtccgacgacatcaagcgttacgtgaccgagttcccccactaccatagacacgatggtggtttccccctgcccaccgctttcgctcacgagtaccacaactggctgcgtagccccttctcccgttactccgctacctgccccaacgtgctgcactccgtgatgaccctggctgctatgctgtacaagatctcccccgtgtccctggtgctgcagaccaaggctcacatccaccccggtttcgctctgaccgctgtgcgtaccgacaccttcgaggtggacatgctgctgtactccggcaagtcctgcacctccgtcatcatcaacaaccccatcgtgaccaaggaagagagggacatctccaccacctaccacgtgacccagaacatcaacaccgtggacatgggcctgggttacacctccaacacttgcgtggcctacgtgaaccgcgtccgcaccgacatgggtgtccgtgtgcaggacctgttccgtgtgttccccatgaacgtgtaccgccacgatgaggtggaccgttggatcaggcacgctgctggcgtcgagcgtccccagctgctggacaccgagactatctccatgctgaccttcggttccatgtccgagcgcaacgctgctgctaccgtgcacggccagaaggctgtctgcgagctgatcctgacccctgtgactatggacgtgaactacttcaagatcaccaacaaccctcgtggtcgtgcttcctgcatgctgggcgtggacccctacgacaccgaggctgccaccaaggctatctacgaccaccgcgaggctgacgctcagaccttcgctgctacccacaacccatgggcttcccaggctggttgcctgtccgacgtcctgtacaacacccgtcaccgcgagcgtctgggctacaactccaagttctactccccctgcgctcagtacttcaacaccgaggaaatcatcgctgccaacaagaccctcttcaagaccatcgacgagtacctgctgcgcgctaaggactgcatccgtggcgacaccgacactcagtacgtgtgcgtcgagggaaccgagcagctgatcgagaacccttgccgtctgacccaagaggctctgcccatcctgtccaccaccaccctggctctgatggaaactaagctgaagggtggcgctggtgctttcgctacctccgagactcacttcggcaactacgtcgtgggagagatcatccccctgcagcagtccatgctgttcaacagctaagagctcaagcttgtcgagaagtactagaggatcataatcagccataccacatttgtagaggttttacttgctttaaaaaacctcccacacctccccctgaacctgaaacataaaatgaatgcaattgttgttgttaacttgtttattgcagcttataatggttacaaataaagcaatagcatcacaaatttcacaaataaagcatttttttcactgcattctagttgtggtttgtccaaactcatcaatgtatcttatcatgtctggatctgatcactgcttgagcctagaagatccggctgctaacaaagcccgaaaggaagctgagttggctgctgcccaccgctgagcaataactatcataacccccggaatattaatagatcatggagataattaaaatgataaccatctcgcaaataaataagtattttactgttttcgtaacagttttgtaataaaaaaacctataaatattccggattattcataccgtcccaccatcgggcgcggatccgccaccatggctgctatggaagctaacatcttctgcaccttcgaccacaagctgtctatcgctgacgtgggcaagctgaccaagctggtggctgctgtggtgcccatcccccagcgtctgcacctgatcaagcactaccagctgggcctgcaccagttcgtggaccacacccgtggttacgtgcgtctgcgtggcctgctgcgtaacatgaccctgaccctgatgcgtcgtgtcgagggcaaccagatcctgctgcacgtgcccacccacggcctgctgtacaccgtgctgaacaccggtcccgtgacctgggagaagggcgacgctctgtgcgtgctgccccccctgttccacggtcccctggctcgtgaaaacctgttgaccctgggccagtgggagctggtgctgccctggatcgtgcccatgcccctggctctggaaatcaaccagcgcctgctgatcatgggcctgttctccctggaccgttcctacgaagaagtgaaggctgctgtccagcagctgcagaccatcaccttccgtgacgctaccttcaccatccccgaccccgtgatcgaccagcacctcctgatcgacatgaagaccgcttgcctgtccatgtccatggtggctaacctggcttccgagctgaccatgacctacgtccgcaagctggctttggaggactcttccatgctgctggtcaagtgccaagagctgctgatgcgtctggaccgcgagcgttccgtgggcgagcctcgtactcccgctcgtcctcagcacgtgtcccccgacgacgagatcgctcgtctgtccgctctgttcgtgatgctgcgtcagctggacgacctgatccgcgagcaggtcgtgttcaccgtgtgcgacgtgagcccagacaacaagtccgctacctgcatcttcaagggctaaggcgcgccaagcttgtcgagaagtactagaggatcataatcagccataccacatttgtagaggttttacttgctttaaaaaacctcccacacctccccctgaacctgaaacataaaatgaatgcaattgttgttgttaacttgtttattgcagcttataatggttacaaataaagcaatagcatcacaaatttcacaaataaagcatttttttcactgcattctagttgtggtttgtccaaactcatcaatgtatcttatcatgtctggatctgatcactgcttgagcctagaagatccggctgctaacaaagcccgaaaggaagctgagttggctgctgccaccgctgagcaataactatcataacccccggaatattaatagatcatggagataattaaaatgataaccatctcgcaaataaataagtattttactgttttcgtaacagttttgtaataaaaaaacctataaatattccggattattcataccgtcccaccatcgggcgcggatcccggtccgaagcgcgcggaattcaaaggcctgccaccatggaaatgaacaaggtgctgcatcaggatctggtgcaggctacccgtcgtatcctgaagctgggcccctccgagctgcgtgtgaccgacgctggcctgatctgcaagaaccccaactactccgtgtgcgacgctatgctcaagaccgacaccgtgtactgcgtcgagtacctgctgtcctactgggagtcccgtaccgaccacgtgccctgcttcatcttcaagaacaccggttgcgctgtgtccctgtgctgcttcgtgcgtgctcccgtgaagctggtgtcccctgctcgtcacgtgggcgagttcaacgtgctgaaggtcaacgagtccctgatcgtgaccctgaaggacatcgaggaaatcaagccctccgcttacggtgtcctgactaagtgcgtcgtccgcaagtccaactccgcttccgtgttcaacatcgagctgatcgctttcggtcccgagaacgagggcgagtacgagaacctgctgcgcgagctgtacgctaagaaggctgcttccacctccctggctgtgcgtaaccacgtgaccgtgtcctcccactccggttccggtccctccctgtggcgtgctcgtatgtccgctgctctgacccgtaccgctggcaagcgctcctccaggactgctagccctccaccaccacctcctcgtcaccctagctgctctcccactatggtggctgctggtggagctgctgctggtcctagacctccccctcctcctatggctgctggatcctggcgtctgtgccgttgcgaggcttgcatgggccgttgcggttgcgcttccgagggcgacgctgacgaggaagaggaagagttgctggctctggctggcgagggcaaggctgctgctgccgctgccggtcaagacgtcggtggttccgctcgtcgtcccctcgaggaacacgtgtcccgtcgtcgtggtgtctccacccaccaccgtcaccccccttccccaccttgcgctccctccctggaacgtaccggttaccgttgggctccttcctcctggtggcgcgctcgttctggtccttcccgtccccagtccggtccctggctgcctgctcgtttcgctaccctgggtcccctggtcctggctctgctgttggtgctggccctgctgtggcgtggtcacggtcaatcccccagccccacccgttccgctcaccgtgactaaaagcttgtcgagaagtactagaggatcataatcagccataccacatttgtagaggttttacttgctttaaaaaacctcccacacctccccctgaacctgaaacataaaatgaatgcaattgttgttgttaacttgtttattgcagcttataatggttacaaataaagcaatagcatcacaaatttcacaaataaagcatttttttcactgcattctagttgtggtttgtccaaactcatcaatgtatcttatcatgtctggatctgatcactgcttgagcctagaagatccggctgctaacaaagcccgaaaggaagctgagttggctgctgtggctagctttgtttaactttaagaaggagatacatctagaaatattaatagatcatggagataattaaaatgataaccatctcgcaaataaataagtattttactgttttcgtaacagttttgtaataaaaaaacctataaatattccggattattcataccgtcccaccatcgggcgcggatcccggtccgaagcgcgcggaattcaaaggcctacgtcgacgccaccatgtccaacaccgctcccggtcccaccgtggctaacaagcgtgacgagaagcaccgtcacgtggtcaacgtggtgctcgagctgcccaccgagatctccgaggctacccaccccgtgctggctaccatgctgtccaagtacacccgtatgtcctccctgttcaacgacaagtgcgctttcaagctggacctgctgcgtatggtggctgtgtcccgtacccgtcgctaaaagcttgtcgagaagtactagaggatcataatcagccataccacatttgtagaggttttacttgctttaaaaaacctcccacacctccccctgaacctgaaacataaaatgaatgcaattgttgttgttaacttgtttattgcagcttataatggttacaaataaagcaatagcatcacaaatttcacaaataaagcatttttttcactgcattctagttgtggtttgtccaaactcatcaatgtatcttatcatgtctggatctgatcactgcttgagcctagaagatccggctgctaacaaagcccgaaaggaagctgagttggctgctgggtgcctaatgagtgagctaactcacattaattgcccggaatattaatagatcatggagataattaaaatgataaccatctcgcaaataaataagtattttactgttttcgtaacagttttgtaataaaaaaacctataaatattccggattattcataccgtcccaccatcgggcgcggatcccggtccgaagcgcgcggaattcgccaccatggacgctcgtgctgtggctaagcgtccccgtgaccccgctgacgaggacaacgagctggtcaccgctctgaaggctaagcgtgaagtgaacaccatctccgtgcgttacctgtaccacgctgaccaccaggctctgaccgctcgtttcttcgtgcccgagggcctggtcgagttcgaggctcagcccggtgctctgctgatccgtatggaaaccggttgcgactccccccgtcacctgtacatctccctgtacctgctgggtatccgtgcttccaacgtgtccgcttccacccgttgcctgctcgagtccgtgtacaccgcttccgctgctcgtgctgctctgcagtggctggacctgggtccccacctcctgcaccgtcgtctggaaaccctgggttgcgtcaagaccgtgtccctgggtatcacctccctgctgacctgcgtgatgcgcggctacctgtacaacaccctcaagaccgaggtgttcgctctgatgatccccaaggacatgtacctgacctgggaggaaacccgcggtcgtctgcagtacgtgtacctgatcatcgtgtacgactacgacggtcccgagactcgtcccggtatctacgtgctgacctcctctatcgctcactggcagaccctggtggacgtggcccgtggaaagttcgctcgtgaacgctgctccttcgtgaaccgtcgtatcacccgtccccgtcagatccccctgtgcaccggtgtcatccaaaagctgggctggtgcctggctgacgacatccacacctcattcctcgtgcacaaggaactgaagctgtccgtcgtgcgtctggacaacttctccgtcgagctgggcgacttccgcgagttcgtgcagctgttgaattttgaccttcttaagcttgcgggagacgtcgagtccaaccctgggcccatggaatcccgtggtcgtcgttgccccgagatgatctccgtgctgggtcccatctccggtcacgtcctgaaggctgtgttctcccgtggcgacacccccgtgctgccccacgaaactcgtctgctgcagaccggtatccacgtgcgtgtgtcccagccctccctgatcctggtgtcccagtacacccccgactccaccccttgccaccgcggagacaaccagctgcaggtccagcacacctacttcaccggttccgaggtcgagaacgtgtccgtgaacgtgcacaaccccaccggtcgttccatctgcccctcccaagagcccatgtccatctacgtgtacgctctgcccctgaagatgctgaacatcccctccatcaacgtgcaccactacccctccgctgctgagcgcaagcaccgtcacctccccgtggctgacgctgtgatccacgcttccggcaagcagatgtggcaggctcgtctgaccgtgtccggcctggcttggacccgtcagcagaaccagtggaaggaacccgacgtgtactacacctccgctttcgtgttccccaccaaggacgtggccctgcgtcacgtcgtgtgcgctcacgaactcgtgtgctccatggaaaacacccgtgctaccaagatgcaagtgatcggcgaccagtacgtgaaggtgtacctggaatccttctgcgaggacgtgccctccggcaagctgttcatgcacgtgaccctgggttccgacgtggaagaggacctgaccatgacccgtaacccccagcccttcatgcgtccccacgagcgtaacggtttcaccgtgctgtgccccaagaacatgatcatcaagcccggcaagatctcccacatcatgctggacgtggccttcacctcccacgagcacttcggcctgctgtgccctaagtccatccccggcctgtccatctccggcaacctgctgatgaacggccagcagatcttcctggaagtgcaggctatccgtgaaaccgtcgagctgcgtcagtacgaccctgtggctgctctgttcttcttcgacatcgacctgctgctgcagcgtggtccccagtactccgagcaccccaccttcaccagccagtaccgtatccagggcaagctggaataccgtcacacctgggaccgtcacgacgagggtgctgctcagggcgacgacgacgtgtggacctccggttccgactccgacgaggaactggtcaccaccgagcgcaagaccccccgtgtgaccggtggtggtgctatggctggtgcttccacctccgctggtcgcaagcgcaagtccgcttcctccgctaccgcttgcaccgctggtgtcatgacccgtggtcgcctgaaggctgagtccaccgtggctcccgaagaggacactgacgaggactccgacaacgagatccacaaccccgctgtgttcacctggcccccctggcaggctggtatcctggctcgtaacctggtgcccatggtggctaccgtgcagggccagaacctgaagtaccaagagttcttctgggacgccaacgacatctaccgtatcttcgctgagctggaaggcgtgtggcagcccgctgctcagcccaagcgtcgtcgtcaccgtcaggacgctctgcctggtccctgtatcgcttccacccccaagaagcaccgcggctaaaagcttgtcgagaagtactagaggatcataatcagccataccacatttgtagaggttttacttgctttaaaaaacctcccacacctccccctgaacctgaaacataaaatgaatgcaattgttgttgttaacttgtttattgcagcttataatggttacaaataaagcaatagcatcacaaatttcacaaataaagcatttttttcactgcattctagttgtggtttgtccaaactcatcaatgtatcttatcatgtctggatctgatcactgcttgagcctagaagatccggctgctaacaaagcccgaaaggaagctgagttggctgctgtggctagctttgtttaactttaagaaggagatacatctagacctgcaggccggaatattaatagatcatggagataattaaaatgataaccatctcgcaaataaataagtattttactgttttcgtaacagttttgtaataaaaaaacctataaatattccggattattcataccgtcccaccatcgggcgcggatcccggtccgaagcgcgcggaattcgccaccatgaccatggacgagcagcagccccaggctgtgacccccgtgtacgtgggcggtttcctggctcgttacgaccagtcccccgacgaggctgagctgctgctgccacgtgacgtggtcgaacactggctgcacgctcagggccagggacagccttccctgtccgtggctctgcccctgaacatcaaccacgacgacaccgctgtcgtgggtcacgtggccgctatgcagtccgtgcgtgacggcctgttctgcctgggttgcgtgacctccccccgtttcctggaaatcgtgcgtcgtgcttccgagaagtccgagctggtgtcccgtggtcccgtgtccccactgcagcccgacaaggtggtcgagttcctgtccggttcctacgctggcctgtccctgtcatcccgtcgttgcgacgacgtcgaggctgctacctccctgagcggctccgagactacccccttcaagcacgtggccctgtgctccgtgggtcgtaggcgtggaaccctggctgtgtacggtcgtgaccccgagtgggtcacccagcgtttccccgacctgaccgctgctgaccgtgacggactgcgtgctcagtggcagcgttgcggttccaccgctgtggacgcttccggcgaccccttccgttccgactcctacggcctgctgggcaactccgtggacgctctgtacatccgcgagcgtctgcccaagctgcgttacgacaagcagctcgtgggtgtcaccgagcgcgagtcctacgtgaaggcttccgtgtcccccgaggctgcttgcgacatcaaggctgcttccgctgagcgttctggcgacagccgctcccaggctgctactcctgctgctggtgctcgtgtgccctccagctccccatccccacctgtcgagcctccctcccccgtgcaacctcctgctctgcctgcttccccctccgtgctgcctgctgagtccagcccctccctgtcaccctctgagcctgctgaggctgcctccatgtcccaccctctgagcgctgctgtgactgctgctaccgctccccctggtgctactgtggctggtgcttcccccgctgtgccttccctggcttggcctcacgacggtgtctacctgcccaaggacgctttcttctccctgctgggcgcttcccgttccgctgctcccgtgatgtaccccggtgctgtggctgctccccccagcgcttcacctgctcctctgcccctgccctcctaccccgcttcctacggtgctcccgtcgtgggttacgaccagctggctgctcgtcacttcgctgactacgtggacccccactaccccggctggggtcgtcgttacgagcccgctccttccctgcacccatcctaccctgtgccccctcctccatcacccgcttactaccgtcgtcgtgactcccccggtggcatggacgagcctccatctggatgggagcgttacgacggttcccaccgtggccagtcccaaaagcagcaccgtcacggtggttccggtggtcacaacaagcgtcgcaaggaagccgctgctgcatcctccagctccgacgaggacctgagcttccccggcgaggctgaacacggtcgtgctcgcaagcgtctgaagtcccacgtgaactccgacggaggtagcggaggccacgctggttccaaccagcagcagcaacagcgctacgacgagctgcgtgacgctatccacgagctgaagcgtgacctgttcgctgctcgccagtcctccaccctgctgtctgctgctctgccagctgccgcttcttcctcccctaccaccaccaccgtgtgcacccctactggcgagctgacctctggtggtggcgagactcccaccgctctgctgtccggtggtgctaaggtggccgagcgtgctcaggctggtgtcgtgaacgcttcctgccgtctggctaccgcttccggttccgaggctgccaccgctggtccctctaccgctggttcctcatcctgcccagcttccgtggtgctggctgccgctgctgctcaagccgccgctgcttcacagtcccccccaaaggatatggtggacctgaaccgtcgtatcttcgtggctgctctgaacaagctcgagtaataaaagcttgtcgagaagtactagaggatcataatcagccataccacatttgtagaggttttacttgctttaaaaaacctcccacacctccccctgaacctgaaacataaaatgaatgcaattgttgttgttaacttgtttattgcagcttataatggttacaaataaagcaatagcatcacaaatttcacaaataaagcatttttttcactgcattctagttgtggtttgtccaaactcatcaatgtatcttatcatgtctggatctgatcactgcttgagcctagaagatccggctgctaacaaagcccgaaaggaagctgagttggctgctgccaccgctgagcaataactatcataacccctaggggcctctaaacgggtcttgaggggttttttgctgaaaggaggaactatatccggatctgaacaggagggacagctgatagaaacagaagccactggagcacctcaaaaacaccatcatacactaaatcagtaagttggcagcatcacccgacgcactttgcgccgaataaatacctgtgacggaagatcacttcgcagaataaataaatcctggtgtccctgttgataccgggaagccctgggccaacttttggcgaaaatgagacgttgatcggcacgtaagaggttccaactttcaccataatgaaataagatcactaccgggcgtattttttgagttatcgagattttcaggagctaaggaagctaaaatggagaaaaaaatcactggatataccaccgttgatatatcccaatggcatcgtaaagaacattttgaggcatttcagtcagttgctcaatgtacctataaccagaccgttcagctggatattacggcctttttaaagaccgtaaagaaaaataagcacaagttttatccggcctttattcacattcttgcccgcctgatgaatgctcatccggaattccgtatggcaatgaaagacggtgagctggtgatatgggatagtgttcacccttgttacaccgttttccatgagcaaactgaaacgttttcatcgctctggagtgaataccacgacgatttccggcagtttctacacatatattcgcaagatgtggcgtgttacggtgaaaacctggcctatttccctaaagggtttattgagaatatgtttttcgtctcagccaatccctgggtgagtttcaccagttttgatttaaacgtggccaatatggacaacttcttcgcccccgttttcaccatgggcaaatattatacgcaaggcgacaaggtgctgatgccgctggcgattcaggttcatcatgccgtttgtgatggcttccatgtcggcagaatgcttaatgaattacaacagtactgcgatgagtggcagggcggggcgtaatttttttaaggcagttattggtgcccttaaacgcctggttgctacgcctgaataagtgataataagcggatgaatggcagaaattcgaaagcaaattcgacccggtcgtcggttcagggcagggtcgttaaatagccgcttatgtctattgctggtttaccggtttattgactaccggaagcagtgtgaccgtgtgcttctcaaatgcctgaggccagtttgctcaggctctccccgtggaggtaataattgacgatatgatcatttattctgcctcccagctgacattcatccggggtcagcaccgtttctgcggactggctttctacgtgttccgcttcctttagcagcccttgcgccctgagtgcttgcggcagcgtgaagctaattctgtcagccgttaagtgttcctgtgtcactcaaaattgctttgagaggctctaagggcttctcagtgcgttacatccctggcttgttgtccacaaccgttaaaccttaaaagctttaaaagccttatatattcttttttttcttataaaacttaaaaccttagaggctatttaagttgctgatttatattaattttattgttcaaacatgagagcttagtacgtgaaacatgagagcttagtacgttagccatgagagcttagtacgttagccatgagggtttagttcgttaaacatgagagcttagtacgttaaacatgagagcttagtacgtgaaacatgagagcttagtacgtactatcaacaggttgaactgctgatcaacagatcctctacgcggccgcggtaccataacttcgtatagcatacattatacgaagttatctggtttaaacgtacccgtagtggctatggcagggcttgccgccccgacgttggctgcgagccctgggccttcacccgaacttgggggttggggtggggaaaaggaagaaacgcgggcgtattggtcccaatggggtctcggtggggtatcgacagagtgccagccctgggaccgaaccccgcgtttatgaacaaacgacccaacacccgtgcgttttattctgtctttttattgccgtcatagcgcgggttccttccggtattgtctccttccgtgtttcagttagcctcccccatctcccggtaccgcatgctatgcatcagctgctagcttagcgagcgtccacagcctggggaccgtaacgggagtgagcgggcaggttcacacgggtctgcttcagctcagggggcaggccagcgtagtacttgtccaggtgacgcagcaggggggggtccagctggtgacgcaggcagaattccttcacagcgttgtacaggccgtagaacagggtgataccctcgggagcagcagcggtggacacgggcagacgcacagcacggttggtacgggtagcctcgttacggatagccaccaccacgttgaacagggaggggggcaccagctcgaaacccagcacgtgttcggtgaagatggaacgaccgtaggacagacgagtcaggtcgtaaccacggcacaggtcgtccacgcaagtgtacacagcgggggaaccgtcgccgcactcggagtaaccgcgcatcacggtcatccaacggggagcggtgtcggaggacagcagggtcagcagagcacgcagctggtcggggttgttgtacagcagggccagggtgtccaggaaagcgtcgtccagcagcacggagttagcagcctcgggggtcacgggacggtaacggatcagctgggacaggggaccgtccctacgggtcacgttgaccaggggacgcagccaggactcgtacttgtcgccctggaacacctctcccagcaggcaacgacgggtcagctcggggcactcagcgggcaccttctcagccacggtgggagccacggacacggtagcggaggacacgatgggcagcagcaggcagcaccacagcagagccacgggaccgggggagaaggagaaaccgcagtcgggacgacggcacatggtggctcgagatcccgggtgatcaagtcttcgtcgagtgattgtaaataaaatgtaatttacagtatagtattttaattaatatacaaatgatttgataataattcttatttaactataatatattgtgttgggttgaattaaaggtccgtatactagtatcgattcgcgacctactccggaatattaatagatcatggagataattaaaatgataaccatctcgcaaataaataagtattttactgttttcgtaacagttttgtaataaaaaaacctataaatattccggattattcataccgtcccaccatcgggcgcggatccgccaccatgtcccccaagaacctgacccccttcctgaccgctctgtggctgctgctgggccactcccgtgtgcctcgtgtgcgtgctgaggaatgctgcgagttcatcaacgtgaaccacccccccgagcgctgctacgacttcaagatgtgcaaccgtttcaccgtggctctgcgttgccccgacggcgaagtgtgctactcccccgaaaagaccgctgagatccgtggtatcgtgaccaccatgacccactccctgacccgtcaggtggtgcacaacaagctgacctcttgcaactacaaccccctgtacctcgaggctgacggtcgtatccgttgcggcaaggtcaacgacaaggctcagtacctgctgggtgctgctggttccgtgccctaccgttggatcaacctcgagtacgacaagatcacccgtatcgtgggcctggaccagtacctcgagtccgtgaagaagcacaagcgtctggacgtgtgccgtgctaagatgggttacatgctgcagtaaaagcttgtcgagaagtactagaggatcataatcagccataccacatttgtagaggttttacttgctttaaaaaacctcccacacctccccctgaacctgaaacataaaatgaatgcaattgttgttgttaacttgtttattgcagcttataatggttacaaataaagcaatagcatcacaaatttcacaaataaagcatttttttcactgcattctagttgtggtttgtccaaactcatcaatgtatcttatcatgtctggatctgatcactgcttgagcctagaagatccggctgctaacaaagcccgaaaggaagctgagttggctgctgtggctagctttgtttaactttaagaaggagatacatctagaccggaatattaatagatcatggagataattaaaatgataaccatctcgcaaataaataagtattttactgttttcgtaacagttttgtaataaaaaaacctataaatattccggattattcataccgtcccaccatcgggcgcggatccgccaccatgctgcgtctgctgctgcgtcaccacttccactgcctgctgctgtgcgctgtgtgggctaccccctgcctggcttccccttggtccaccctgaccgctaaccagaacccctccccaccctggtccaagctgacctactccaagccccacgacgctgctaccttctactgccccttcctgtacccatccccccctcgttccccactgcagttctccggtttccagcgtgtgctgaccggtcccgagtgccgtaacgagactctgtacctgctgtacaaccgcgagggccagaccctggtcgagaggtcctccacctgggtcaagaaggtcatctggtacttgtccggtcgtaaccagaccatcctgcagcgtatgccccgtaccgcttccaagccctccgacggcaacgtgcagatctccgtcgaggacgctaagatcttcggtgctcacatggtgcccaagcagaccaagctgctgcgtttcgtggtcaacgacggcacccgttaccagatgtgcgtgatgaagctcgagtcctgggctcacgtgttccgtgactactccgtgtccttccaagtgcgcctgaccttcaccgaggctaacaaccagacctacaccttctgcacccaccccaacctgatcgtgtaaaagcttgtcgagaagtactagaggatcataatcagccataccacatttgtagaggttttacttgctttaaaaaacctcccacacctccccctgaacctgaaacataaaatgaatgcaattgttgttgttaacttgtttattgcagcttataatggttacaaataaagcaatagcatcacaaatttcacaaataaagcatttttttcactgcattctagttgtggtttgtccaaactcatcaatgtatcttatcatgtctggatctgatcactgcttgagcctagaagatccggctgctaacaaagcccgaaaggaagctgagttggctgctgggtgcctaatgagtgagctaactcacattaattgcccggaatattaatagatcatggagataattaaaatgataaccatctcgcaaataaataagtattttactgttttcgtaacagttttgtaataaaaaaacctataaatattccggattattcataccgtcccaccatcgggcgcggatccgccaccatgcgtctgtgccgtgtgtggctgtccgtgtgcctgtgcgctgtggtgctgggccagtgccagcgtgaaaccgctgagaagaacgactactaccgtgtgccccactactgggacgcttgctcccgtgctctgcccgaccagacccgttacaagtacgtcgagcagctggtggacctgaccctgaactaccactacgacgcttcccacggcctggacaacttcgacgtgctgaagcgtatcaacgtgaccgaggtgtccctgctgatctccgacttccgtcgtcagaaccgtcgtggtggcaccaacaagcgtaccaccttcaacgctgctggttccctggctccccacgctcgttccctcgagttctccgtgcgtctgttcgctaactaaaagcttgtcgagaagtactagaggatcataatcagccataccacatttgtagaggttttacttgctttaaaaaacctcccacacctccccctgaacctgaaacataaaatgaatgcaattgttgttgttaacttgtttattgcagcttataatggttacaaataaagcaatagcatcacaaatttcacaaataaagcatttttttcactgcattctagttgtggtttgtccaaactcatcaatgtatcttatcatgtctggatctgatcactgcttgagcctagaagatccggctgctaacaaagcccgaaaggaagctgagttggctgctgccaccgctgagcaataactatcataacccccggaatattaatagatcatggagataattaaaatgataaccatctcgcaaataaataagtattttactgttttcgtaacagttttgtaataaaaaaacctataaatattccggattattcataccgtcccaccatcgggcgcggatcccggtccgaagcgcgcggaattcaaaggcctaccgtcgacgccaccatggaatcccgtatctggtgcctggtcgtgtgcgtgaacctgtgcatcgtgtgcctgggtgctgctgtgtcctcctcctccacccgtggcacctccgctacccactcccaccactcctcccacaccacctccgccgctcactcccgttccggttccgtgtcccagcgtgtgacctcctcccagaccgtgtcccacggtgtcaacgagactatctacaacaccaccctgaagtacggcgacgtcgtgggtgtcaacaccaccaagtacccctaccgtgtgtgctccatggctcagggcaccgacctgatccgtttcgagcgtaacatcgtgtgcacctccatgaagcccatcaacgaggacctggacgagggtatcatggtggtgtacaagcgcaacatcgtggctcacaccttcaaggtccgcgtgtaccagaaggtgctgaccttccgtcgttcctacgcttacatccacaccacttacctgctgggttccaacaccgagtacgtggcccctcccatgtgggagatccaccacatcaactcccactcccagtgctactcctcttactcccgtgtgatcgctggcaccgtgttcgtggcttaccaccgtgactcctacgagaacaagaccatgcagctgatgcccgacgactactccaacacccactccacccgttacgtgaccgtgaaggaccagtggcactcccgtggttccacctggctgtaccgtgaaacctgcaacctgaactgcatggtcaccatcaccaccgctcgttccaagtacccttaccacttcttcgctacctccaccggcgacgtggtggacatctcccccttctacaacggtactaaccgtaacgcttcctacttcggcgagaacgctgacaagttcttcatcttccccaactacaccatcgtgtccgacttcggtcgtcccaactccgctctggaaacccaccgtctggtggctttcttggagcgtgctgactccgtgatctcctgggacatccaggacgagaagaacgtgacctgccagctgaccttctgggaggcttccgagcgtaccatccgttccgaggctgaggactcctaccacttctccagcgctaagatgaccgctaccttcctgtccaagaaacaagaggtcaacatgtccgactccgccctggactgcgtgcgtgacgaggctatcaacaagctgcagcagatcttcaacacctcctacaaccagacctacgagaagtacggaaacgtgtccgtgttcgagactaccggtggcctggtggtgttctggcagggtatcaagcagaagtccctggtcgagctggaacgtctggctaaccgttcctccctgaacctgacccacaaccgtaccaagcgttccaccgacggcaacaacgctactcacctgtccaacatggaatccgtgcacaacctggtgtacgctcagctgcagttcacctacgacaccctgcgcggttacatcaaccgtgctctggctcagatcgctgaggcttggtgcgtggaccagcgtcgtaccctggaagtgttcaaggaactgtccaagatcaacccctccgctatcctgtccgccatctacaacaagcctatcgctgctcgtttcatgggcgacgtgctgggcctggcttcctgcgtgaccatcaaccagacttccgtgaaggtgctgcgtgacatgaacgtgaaggaatcccccggtcgttgctactcccgtcccgtggtcatcttcaacttcgctaactcctcctacgtgcagtacggccagctgggcgaggacaacgagatcctgctgggcaaccaccgtaccgaggaatgccagctgccctccctgaagatcttcatcgctggcaactccgcttacgaatacgtggactacctgttcaagcgcatgatcgacctgtcctccatctctaccgtggactccatgatcgctctggacatcgaccccctggaaaacaccgacttccgtgtgctggaactgtactcccagaaggaactgcgttccatcaacgtgttcgacctggaagagatcatgcgcgagttcaactcctacaagcagcgtgttaagtacgtcgaggacaaggtggtggaccccctgcccccctacctgaagggactggacgacctgatgtccggcctgggagctgccggcaaggctgtgggtgtcgctatcggtgctgtgggtggtgctgtggcttccgtggtcgagggtgtcgccaccttcctgaagaaccccttcggtgctttcaccatcatcctggtggctatcgctgtggtcatcatcatctacctgatctacacccgtcagcgtcgtctgtgcatgcagcccctgcagaacctgttcccctacctggtgtccgctgacggtactaccgtgacctccggcaacaccaaggacacctccctgcaggctcccccatcctacgaggaatccgtctacaactccggtcgcaagggtcccggtcccccttcctccgacgcttctaccgctgctcccccatacaccaacgagcaggcttaccagatgctgctggctctcgtgcgtctggacgctgagcagcgtgcacagcagaacggcaccgactccctggacggccagaccggaacccaggacaagggccagaagcccaacctgctggaccgtctgcgtcaccgcaagaacggttaccgtcacctgaaggactccgacgaggaagagaacgtctaaggcgcgccaagcttgtcgagaagtactagagatcataatcagccataccacatttgtagaggttttacttgctttaaaaaacctcccacacctccccctgaacctgaaacataaaatgaatgcaattgttgttgttaacttgtttattgcagcttataatggttacaaataaagcaatagcatcacaaatttcacaaataaagcatttttttcactgcattctagttgtggtttgtccaaactcatcaatgtatcttatcatgtctggatctgatcactgcttgagcctagaagatccggctgctaacaaagcccgaaaggaagctgggaatattaatagatcatggagataattaaaatgataaccatctcgcaaataaataagtattttactgttttcgtaacagttttgtaataaaaaaacctataaatattccggattattcataccgtcccaccatcgggcgcggatccgccaccatgcgtcccggcctgccctcctacctgatcgtgctggctgtgtgcctgctgtcccacctcctgtcctcccgttacggtgctgaggctatctccgagcccctggacaaggctttccacctcctgctgaacacctacggtcgtcctatccgtttcctgcgcgagaacaccacccagtgcacctacaactcctccctgcgcaactccaccgtcgtccgcgagaacgctatctccttcaacttcttccagtcctacaaccagtactacgtgttccacatgccccgttgcctgttcgctggtcccctggctgagcagttcctgaaccaggtggacctgaccgagactctcgagcgttaccagcagcgtctgaacacttacgctctggtgtccaaggacctggcttcctaccgttccttcagccagcagctgaaggctcaggactccctgggcgagcagcccaccactgtgcctccccctatcgacctgtccatcccccacgtgtggatgcccccccagaccactcctcacggctggaccgagtcccacaccacctccggactgcaccgtccccacttcaaccagacctgcatcctgttcgacggtcacgacctgctgttctccaccgtgaccccctgcctgcaccagggcttctacctcatcgacgagctgcgttacgtgaagatcaccctgaccgaggatttcttcgtggtcaccgtgtccatcgacgacgacacccccatgctgctgatcttcggtcacctcccccgtgtgctgttcaaggctccctaccagcgtgacaacttcatcctgcgtcagaccgagaagcacgagctgctggtgctggtcaagaaggaccagctgaaccgtcactcttacctgaaggaccccgacttcctggacgctgctctggacttcaactacctggacctgtccgctctgctgaggaactccttccaccgttacgctgtggacgtgctgaagtccggtcgttgccagatgctggaccgtcgtaccgtcgagatggctttcgcttacgccctggctctgttcgctgctgctcgtcaagaagaggctggcgctcaggtgtccgtgccccgtgctctggaccgtcaggctgctctgctgcagatccaagagttcatgatcacttgcctgtcccagaccccccctcgtaccaccctgctgctgtaccccaccgctgtggacctggctaagcgtgctctgtggacccccaaccagatcaccgacatcacctccctcgtgcgtctggtgtacatcctgtccaagcagaaccagcagcacctgatcccccagtgggctctgcgtcagatcgctgacttcgctctgaagctgcacaagacccacctggcttcattcctcagcgctttcgctcgccaagagctgtacctgatgggttccctggtgcactccatgctggtgcacaccaccgagcgtcgcgagatcttcatcgtggaaaccggcctgtgctccctggccgagctgtcccacttcacccagctgctggctcacccccaccacgagtacctgtccgacctgtacaccccctgctcctcttccggtcgtcgtgaccactccctggaacgtctgacccgtctgttccccgacgctaccgtgcctaccaccgtgcctgctgctctgtccatcctgtctaccatgcagccctccaccctggaaaccttccccgacctgttctgcctgcctctgggcgagtccttctccgctctgaccgtgtccgagcacgtgtcctacgtggtcaccaaccagtacctgatcaagggcatctcctaccccgtgtccaccaccgtcgtgggccagtccctgatcatcacccagaccgactcccagaccaagtgcgagctgacccgtaacatgcacaccactcactccatcaccgctgctctgaacatctccctcgagaactgcgctttctgccagtccgctctgttggagtacgacgacactcagggtgtcatcaacatcatgtacatgcacgactccgacgacgtgctgttcgctctggacccctacaacgaggtggtggtgtcctccccccgtacccactacctgatgctgctgaagaacggcaccgtgctggaagtgaccgacgtggtggtggacgctaccgaccgtctgctgatgatgtccgtgtacgctctgtccgctatcatcggcatctacctgctgtaccgtatgctgaagacctgctaaggcgccaagctttgtcgagaagtactagaggatcataatcagccataccacatttgtagaggttttacttgctttaaaaaacctcccacacctccccctgaacctgaaacataaaatgaatgcaattgttgttgttaacttgtttattgcagcttataatggttacaaataaagcaatagcatcacaaatttcacaaataaagcatttttttcactgcattctagttgtggtttgtccaaactcatcaatgtatcttatcatgtctggatctgatcactgcttgagcctagaagatccggctgctaacaaagcccgaaaggaagctgagttggctgctgccaccgctgagcaataactatcataacccctaggagatccgaaccagataagtgaaatctagttccaaactattttgtcatttttaattttcgtattagcttacgacgctacacccagttcccatctattttgtcactcttccctaaataatccttaaaaactccatttccacccctcccagttcccaactattttgtccgcccaca

SEQ ID NO: 54 - DNA, 30871 bp, Artificial Sequence
  Synthetic construct
ttgttccagtttggaacaagagtccactattaaagaacgtggactccaacgtcaaagggcgaaaaaccgtctatcagggcgatggcccactacgtgaaccatcaccctaatcaagttttttggggtcgaggtgccgtaaagcactaaatcggaaccctaaagggagcccccgatttagagcttgacggggaaagccggcgaacgtggcgagaaaggaagggaagaaagcgaaaggagcgggcgctagggcgctggcaagtgtagcggtcacgctgcgcgtaaccaccacacccgccgcgcttaatgcgccgctacagggcgcgtccattcgccattcaggctgcgcaactgttgggaagggcgatcggtgcgggcctcttcgctattacgccagctggcgaaagggggatgtgctgcaaggcgattaagttgggtaacgccagggttttcccagtcacgacgttgtaaaacgacggccagtgcatagaccagccgcgtaacctggcaaaatcggttacggttgagtaataaatggatgccctgcgtaagcgggtgtgggcggacaataaagtcttaaactgaacaaaatagatctaaactatgacaataaagtcttaaactagacagaatagttgtaaactgaaatcagtccagttatgctgtgaaaaagcatactggacttttgttatggctaaagcaaactcttcattttctgaagtgcaaattgcccgtcgtattaaagaggggcgtggccaagggcatggtaaagactatattcgcggcgttgtgacaatttaccgaacaactccgcggccgggaagccgatctcggcttgaacgaattgttaggtggcggtacttgggtcgatatcaaagtgcatcacttcttcccgtatgcccaactttgtatagagagccactgcgggatcgtcaccgtaatctgcttgcacgtagatcacataagcaccaagcgcgttggcctcatgcttgaggagattgatgagcgcggtggcaatgccctgcctccggtgctcgccggagactgcgagatcatagatatagatctcactacgcggctgctcaaacttgggcagaacgtaagccgcgagagcgccaacaaccgcttcttggtcgaaggcagcaagcgcgatgaatgtcttactacggagcaagttcccgaggtaatcggagtccggctgatgttgggagtaggtggctacgtctccgaactcacgaccgaaaagatcaagagcagcccgcatggatttgacttggtcagggccgagcctacatgtgcgaatgatgcccatacttgagccacctaactttgttttagggcgactgccctgctgcgtaacatcgttgctgctgcgtaacatcgttgctgctccataacatcaaacatcgacccacggcgtaacgcgcttgctgcttggatgcccgaggcatagactgtacaaaaaaacagtcataacaagccatgaaaaccgccactgcgccgttaccaccgctgcgttcggtcaaggttctggaccagttgcgtgagcgcatacgctacttgcattacagtttacgaaccgaacaggcttatgtcaactgggtttgtgccttcatccgtttccacggtgtgcgtcacccggcaaccttgggcagcagcgaagtcgaggcatttctgtcctggctggcgaacgagcgcaaggtttcggtctccacgcatcgtcaggcattggcggccttgctgttcttctacggcaaggtgctgtgcacggatctgcccttgcttcaggagatcggtagacctcggccgtcgcggcgcttgccggtggtgctgaccccggatgaagtggttcgcatcctcggttttctggaaggcgagcatcgtttgttcgcccaggactctagctatagttctagtggttggctacagctttgtttgtactatcaacaggttgaactgctgatcaacagatcctctacgcggccgcggtaccataacttcgtatagcatacattatacgaagttatctggtttaaacgtacccgtagtggctatggcagggcttgccgccccgacgttggctgcgagccctgggccttcacccgaacttgggggttggggtggggaaaaggaagaaacgcgggcgtattggtcccaatggggtctcggtggggtatcgacagagtgccagccctgggaccgaaccccgcgtttatgaacaaacgacccaacacccgtgcgttttattctgtctttttattgccgtcatagcgcgggttccttccggtattgtctccttccgtgtttcagttagcctcccccatctcccggtaccgcatgctatgcatcagctgctagcttactgcagccaccaccacagggagttcagggtggacaggttcacagcacgacggtgctcagggggggtcaggttgccgtaggtggaggactgcaggctgaagttacggatctcagacaggaacagcagggagtccaggtagtcccacatggggtcgatgaaggtgcgctggaaacgggtggatggggaggtgggggtggtcttgttgttgtcggaagcagtctcgttctcgacgggcatggtgtcgttgtagtacagggaggacatgtccagggtgccgtagatggtgtagggagtctcgttacggatcagcacgtgagtgttcttcatgaactcggacacagcggtacggttacggttgggcttgcagaagggctcgtcacggtaacgcagggtggtgtacacccaggtagccaggtccttcagctgagtggtcaggatagacttcatgaagttctcgtcgggacggtaaccgatggtagaggtggggatacgggtgggcacgatgggggagtaggtcacgttggtggaaacgttgaagatggtggaggtgtaggaggagtagggggtagtagtgctgacgcgggacttcttggagatggacttcacgggagcctgcttgcgcttcagcttgcgcatggtgttcttcagcttggtggagttgatgtacttgggcacacggaagatgttacgggacatagcgttgaccaggtagaaggaacgggtgcagttgcgctgagcgtaacgcagcagcagagcagccaggcccaggaagtagatagtctgggagtccacgttgaccttggaggggcccacgtacagcttggtgttccaacggggcacgttgaagaacatggggttgaaggtggtgaagttgccgcagttttcctcgccggtgttgttacgacgggacacgttcagcatctcggacaggcaggtcatggaggggatggtgccgcaagaggggggacggaaggtgatcttctggccggtgtggttgtactcggagtacacgtacttagcgggcttgcgcagctgggtggtgtggaagtcgaaccacaggtgggtgatggagtggttacggatgggaccagccaggatggagttgggggggaactgcttcatctcgacggtgatgttgtacagcttctgctggctggggaaggtgaagaacttgtagtagtcgccggtcttggaagccagctcttgcaggatacgcagcttcagctggcgttcctcttccttagccttctgggacttcacacggaaacgagccacagcgatcttgcagttgatgaagctgaacagcaggaaggtcagggacatcaggaagaacaggttgaacacgccacgcatctcgcccttgcgacccatggtggcctcgagatcccgggtgatcaagtcttcgtcgagtgattgtaaataaaatgtaatttacagtatagtattttaattaatatacaaatgatttgataataattcttatttaactataatatattgtgttgggttgaattaaaggtccgtatactagtatcgattcgcgacctactccggaatattaatagatcatggagataattaaaatgataaccatctcgcaaataaataagtattttactgttttcgtaacagttttgtaataaaaaaacctataaatattccggattattcataccgtcccaccatcgggcgcggatccgccaccatggaaaactggtccgctctggaactgctgcccaaggtcggaatccctaccgacttcctgacccacgtcaagacctccgctggcgaggaaatgttcgaggctctgaggatctactacggcgacgaccccgagcgttacaacatccacttcgaggctatcttcggcaccttctgcaaccgtctggaatgggtgtacttcctgacttccggcctggctgctgctgctcacgctatcaagttccacgacctgaacaagctgaccaccggcaagatgctgttccacgtgcaagtgccccgtgtggcttccggtgctggcctgcctacctcccgtcagaccaccatcatggtcaccaagtactccgagaagtcccccatcaccatccctttcgagctgtccgctgcttgcctgacttacctgcgtgaaaccttcgagggcaccatcctggacaagatcctgaacgtcgaggctatgcacaccgtgctgcgtgctctgaagaacaccgctgacgctatggaacgtggcctgatccacagcttcctccagaccctgctgaggaaggctcccccctacttcgtggtgcagaccctggtcgagaacgctaccctggctcgtcaggctctgaaccgtatccagcgctccaacatcctgcagtccttcaaggctaagatgctggctaccctgttcctgctgaaccgtacccgtgaccgtgactacgtgctgaagttcctgacccgtctggctgaggctgctaccgactccatcctcgacaaccctactacctacaccacctcctccggtgctaagatctccggtgtcatggtgtccaccgctaacgtgatgcagatcatcatgtccctgctgtcctcccacatcactaaggaaaccgtgtccgctcccgctacctacggcaacttcgtgctgtcccccgagaacgctgtgaccgctatctcctaccactctatcctggctgacttcaactcctacaaggctcacctgacctccggccagccccacctccccaacgactccctgagccaggctggtgctcactccctgacccccctgtccatggacgtgatccgtctgggcgaaaagaccgtgatcatggaaaacctgcgtcgcgtgtacaagaacaccgacaccaaggaccccctggaacgtaacgtggacctgaccttcttcttccccgtgggcctgtacctgcccgaggaccgtggttacaccaccgtcgagtccaaggtcaagctgaacgacaccgtgcgtaacgctctgcccaccaccgcttacctgctgaacagggaccgtgctgtgcaaaagatcgacttcgtggacgctctcaagaccctgtgccaccccgtgctgcacgagcctgctccatgcctgcaggctttcaccgagcgtggtcccccatccgagcccgctatgcagcgtctgctggaatgccgtttccagcaagagcccatgggtggtgctgctcgtcgtatcccccacttctaccgtgtgcgccgcgaggtgccccgtaccgtgaacgagatgaagcaggacttcgtggtcaccgacttctacaaggttggaaacatcaccctgtacaccgagctgcaccctttcttcgacttcacccactgccaagagaactccgagactgtggctctgtgcaccccccgtatcgtgatcggcaacctgcccgacggcctggctcccggtcccttccacgagctgaggacctgggagatcatggaacacatgcgcctgcgtcccccacccgactacgaggaaaccctgcgtctgttcaagaccaccgtgacctcccccaactaccccgagctgtgctacctggtggacgtgctggtgcacggcaacgctgacgctttcctgctgatccgcgctttcatcgctcgttgcatcgtgaacatgttccacacccgtcagctgctggtgttcgctcactcctacgctctggtcaccctgatcgctgagcacctggctgacggtgctctgcccccccagctcctgttccactaccgtaacctggtggctgtgctgcgcctggtcacccgtatctccgctctgcccggcctgaacaacggccagctggctgaggaacccctgtccgcttacgtgaacgctctgcacgaccacaggctgtggccccccttcgtgacccacctccctcgtaacatggaaggtgtccaggtggtggctgatcgtcagcccctgaaccccgctaacatcgaggctcgtcaccacggtgtctccgacgtgccccgtctgggtgctatggacgctgacgagcccctgttcgtggacgactaccgtgctaccgacgacgagtggaccctgcaaaaggtgttctacctgtgcctgatccccgctatgaccaacaaccgtgcttgcggcctgggcctgaacctcaagactctgctggtggacctgttctaccgtcccgccttcctgctcatgcccgctgctaccgctgtgtccacctccggcaccacctccaaggaatccacctctggtgtcacccccgaggactccgtggctgctcagcgtcaggctgtgggcgagatgctgaccgagctggtcgaggacgtggccaccgacgctcacacccctctgctgcaggcttgccgcgagctgttcctggctgtgcagttcgtgggcgagcacgtgaaggtgctggaagtgcgtgctcccctggaccacgctcagaggcagggactgcccgacttcatctcccgtcagcatgtgctgtacaacggttgctgcgtcgtgaccgctcctaagaccctgatcgagtactccctgcccgtgcccttccaccgtttctactccaaccccaccatctgcgctgctctgtccgacgacatcaagcgttacgtgaccgagttcccccactaccatagacacgatggtggtttccccctgcccaccgctttcgctcacgagtaccacaactggctgcgtagccccttctcccgttactccgctacctgccccaacgtgctgcactccgtgatgaccctggctgctatgctgtacaagatctcccccgtgtccctggtgctgcagaccaaggctcacatccaccccggtttcgctctgaccgctgtgcgtaccgacaccttcgaggtggacatgctgctgtactccggcaagtcctgcacctccgtcatcatcaacaaccccatcgtgaccaaggaagagagggacatctccaccacctaccacgtgacccagaacatcaacaccgtggacatgggcctgggttacacctccaacacttgcgtggcctacgtgaaccgcgtccgcaccgacatgggtgtccgtgtgcaggacctgttccgtgtgttccccatgaacgtgtaccgccacgatgaggtggaccgttggatcaggcacgctgctggcgtcgagcgtccccagctgctggacaccgagactatctccatgctgaccttcggttccatgtccgagcgcaacgctgctgctaccgtgcacggccagaaggctgtctgcgagctgatcctgacccctgtgactatggacgtgaactacttcaagatcaccaacaaccctcgtggtcgtgcttcctgcatgctgggcgtggacccctacgacaccgaggctgccaccaaggctatctacgaccaccgcgaggctgacgctcagaccttcgctgctacccacaacccatgggcttcccaggctggttgcctgtccgacgtcctgtacaacacccgtcaccgcgagcgtctgggctacaactccaagttctactccccctgcgctcagtacttcaacaccgaggaaatcatcgctgccaacaagaccctcttcaagaccatcgacgagtacctgctgcgcgctaaggactgcatccgtggcgacaccgacactcagtacgtgtgcgtcgagggaaccgagcagctgatcgagaacccttgccgtctgacccaagaggctctgcccatcctgtccaccaccaccctggctctgatggaaactaagctgaagggtggcgctggtgctttcgctacctccgagactcacttcggcaactacgtcgtgggagagatcatccccctgcagcagtccatgctgttcaacagctaagagctcaagcttgtcgagaagtactagaggatcataatcagccataccacatttgtagaggttttacttgctttaaaaaacctcccacacctccccctgaacctgaaacataaaatgaatgcaattgttgttgttaacttgtttattgcagcttataatggttacaaataaagcaatagcatcacaaatttcacaaataaagcatttttttcactgcattctagttgtggtttgtccaaactcatcaatgtatcttatcatgtctggatctgatcactgcttgagcctagaagatccggctgctaacaaagcccgaaaggaagctgagttggctgctgcccaccgctgagcaataactatcataacccccggaatattaatagatcatggagataattaaaatgataaccatctcgcaaataaataagtattttactgttttcgtaacagttttgtaataaaaaaacctataaatattccggattattcataccgtcccaccatcgggcgcggatccgccaccatggctgctatggaagctaacatcttctgcaccttcgaccacaagctgtctatcgctgacgtgggcaagctgaccaagctggtggctgctgtggtgcccatcccccagcgtctgcacctgatcaagcactaccagctgggcctgcaccagttcgtggaccacacccgtggttacgtgcgtctgcgtggcctgctgcgtaacatgaccctgaccctgatgcgtcgtgtcgagggcaaccagatcctgctgcacgtgcccacccacggcctgctgtacaccgtgctgaacaccggtcccgtgacctgggagaagggcgacgctctgtgcgtgctgccccccctgttccacggtcccctggctcgtgaaaacctgttgaccctgggccagtgggagctggtgctgccctggatcgtgcccatgcccctggctctggaaatcaaccagcgcctgctgatcatgggcctgttctccctggaccgttcctacgaagaagtgaaggctgctgtccagcagctgcagaccatcaccttccgtgacgctaccttcaccatccccgaccccgtgatcgaccagcacctcctgatcgacatgaagaccgcttgcctgtccatgtccatggtggctaacctggcttccgagctgaccatgacctacgtccgcaagctggctttggaggactcttccatgctgctggtcaagtgccaagagctgctgatgcgtctggaccgcgagcgttccgtgggcgagcctcgtactcccgctcgtcctcagcacgtgtcccccgacgacgagatcgctcgtctgtccgctctgttcgtgatgctgcgtcagctggacgacctgatccgcgagcaggtcgtgttcaccgtgtgcgacgtgagcccagacaacaagtccgctacctgcatcttcaagggctaaggcgcgccaagcttgtcgagaagtactagaggatcataatcagccataccacatttgtagaggttttacttgctttaaaaaacctcccacacctccccctgaacctgaaacataaaatgaatgcaattgttgttgttaacttgtttattgcagcttataatggttacaaataaagcaatagcatcacaaatttcacaaataaagcatttttttcactgcattctagttgtggtttgtccaaactcatcaatgtatcttatcatgtctggatctgatcactgcttgagcctagaagatccggctgctaacaaagcccgaaaggaagctgagttggctgctgccaccgctgagcaataactatcataacccccggaatattaatagatcatggagataattaaaatgataaccatctcgcaaataaataagtattttactgttttcgtaacagttttgtaataaaaaaacctataaatattccggattattcataccgtcccaccatcgggcgcggatcccggtccgaagcgcgcggaattcaaaggcctgccaccatggaaatgaacaaggtgctgcatcaggatctggtgcaggctacccgtcgtatcctgaagctgggcccctccgagctgcgtgtgaccgacgctggcctgatctgcaagaaccccaactactccgtgtgcgacgctatgctcaagaccgacaccgtgtactgcgtcgagtacctgctgtcctactgggagtcccgtaccgaccacgtgccctgcttcatcttcaagaacaccggttgcgctgtgtccctgtgctgcttcgtgcgtgctcccgtgaagctggtgtcccctgctcgtcacgtgggcgagttcaacgtgctgaaggtcaacgagtccctgatcgtgaccctgaaggacatcgaggaaatcaagccctccgcttacggtgtcctgactaagtgcgtcgtccgcaagtccaactccgcttccgtgttcaacatcgagctgatcgctttcggtcccgagaacgagggcgagtacgagaacctgctgcgcgagctgtacgctaagaaggctgcttccacctccctggctgtgcgtaaccacgtgaccgtgtcctcccactccggttccggtccctccctgtggcgtgctcgtatgtccgctgctctgacccgtaccgctggcaagcgctcctccaggactgctagccctccaccaccacctcctcgtcaccctagctgctctcccactatggtggctgctggtggagctgctgctggtcctagacctccccctcctcctatggctgctggatcctggcgtctgtgccgttgcgaggcttgcatgggccgttgcggttgcgcttccgagggcgacgctgacgaggaagaggaagagttgctggctctggctggcgagggcaaggctgctgctgccgctgccggtcaagacgtcggtggttccgctcgtcgtcccctcgaggaacacgtgtcccgtcgtcgtggtgtctccacccaccaccgtcaccccccttccccaccttgcgctccctccctggaacgtaccggttaccgttgggctccttcctcctggtggcgcgctcgttctggtccttcccgtccccagtccggtccctggctgcctgctcgtttcgctaccctgggtcccctggtcctggctctgctgttggtgctggccctgctgtggcgtggtcacggtcaatcccccagccccacccgttccgctcaccgtgactaaaagcttgtcgagaagtactagaggatcataatcagccataccacatttgtagaggttttacttgctttaaaaaacctcccacacctccccctgaacctgaaacataaaatgaatgcaattgttgttgttaacttgtttattgcagcttataatggttacaaataaagcaatagcatcacaaatttcacaaataaagcatttttttcactgcattctagttgtggtttgtccaaactcatcaatgtatcttatcatgtctggatctgatcactgcttgagcctagaagatccggctgctaacaaagcccgaaaggaagctgagttggctgctgtggctagctttgtttaactttaagaaggagatacatctagaaatattaatagatcatggagataattaaaatgataaccatctcgcaaataaataagtattttactgttttcgtaacagttttgtaataaaaaaacctataaatattccggattattcataccgtcccaccatcgggcgcggatcccggtccgaagcgcgcggaattcaaaggcctacgtcgacgccaccatgtccaacaccgctcccggtcccaccgtggctaacaagcgtgacgagaagcaccgtcacgtggtcaacgtggtgctcgagctgcccaccgagatctccgaggctacccaccccgtgctggctaccatgctgtccaagtacacccgtatgtcctccctgttcaacgacaagtgcgctttcaagctggacctgctgcgtatggtggctgtgtcccgtacccgtcgctaaaagcttgtcgagaagtactagaggatcataatcagccataccacatttgtagaggttttacttgctttaaaaaacctcccacacctccccctgaacctgaaacataaaatgaatgcaattgttgttgttaacttgtttattgcagcttataatggttacaaataaagcaatagcatcacaaatttcacaaataaagcatttttttcactgcattctagttgtggtttgtccaaactcatcaatgtatcttatcatgtctggatctgatcactgcttgagcctagaagatccggctgctaacaaagcccgaaaggaagctgagttggctgctgggtgcctaatgagtgagctaactcacattaattgcccggaatattaatagatcatggagataattaaaatgataaccatctcgcaaataaataagtattttactgttttcgtaacagttttgtaataaaaaaacctataaatattccggattattcataccgtcccaccatcgggcgcggatcccggtccgaagcgcgcggaattcgccaccatggacgctcgtgctgtggctaagcgtccccgtgaccccgctgacgaggacaacgagctggtcaccgctctgaaggctaagcgtgaagtgaacaccatctccgtgcgttacctgtaccacgctgaccaccaggctctgaccgctcgtttcttcgtgcccgagggcctggtcgagttcgaggctcagcccggtgctctgctgatccgtatggaaaccggttgcgactccccccgtcacctgtacatctccctgtacctgctgggtatccgtgcttccaacgtgtccgcttccacccgttgcctgctcgagtccgtgtacaccgcttccgctgctcgtgctgctctgcagtggctggacctgggtccccacctcctgcaccgtcgtctggaaaccctgggttgcgtcaagaccgtgtccctgggtatcacctccctgctgacctgcgtgatgcgcggctacctgtacaacaccctcaagaccgaggtgttcgctctgatgatccccaaggacatgtacctgacctgggaggaaacccgcggtcgtctgcagtacgtgtacctgatcatcgtgtacgactacgacggtcccgagactcgtcccggtatctacgtgctgacctcctctatcgctcactggcagaccctggtggacgtggcccgtggaaagttcgctcgtgaacgctgctccttcgtgaaccgtcgtatcacccgtccccgtcagatccccctgtgcaccggtgtcatccaaaagctgggctggtgcctggctgacgacatccacacctcattcctcgtgcacaaggaactgaagctgtccgtcgtgcgtctggacaacttctccgtcgagctgggcgacttccgcgagttcgtgcagctgttgaattttgaccttcttaagcttgcgggagacgtcgagtccaaccctgggcccatggaatcccgtggtcgtcgttgccccgagatgatctccgtgctgggtcccatctccggtcacgtcctgaaggctgtgttctcccgtggcgacacccccgtgctgccccacgaaactcgtctgctgcagaccggtatccacgtgcgtgtgtcccagccctccctgatcctggtgtcccagtacacccccgactccaccccttgccaccgcggagacaaccagctgcaggtccagcacacctacttcaccggttccgaggtcgagaacgtgtccgtgaacgtgcacaaccccaccggtcgttccatctgcccctcccaagagcccatgtccatctacgtgtacgctctgcccctgaagatgctgaacatcccctccatcaacgtgcaccactacccctccgctgctgagcgcaagcaccgtcacctccccgtggctgacgctgtgatccacgcttccggcaagcagatgtggcaggctcgtctgaccgtgtccggcctggcttggacccgtcagcagaaccagtggaaggaacccgacgtgtactacacctccgctttcgtgttccccaccaaggacgtggccctgcgtcacgtcgtgtgcgctcacgaactcgtgtgctccatggaaaacacccgtgctaccaagatgcaagtgatcggcgaccagtacgtgaaggtgtacctggaatccttctgcgaggacgtgccctccggcaagctgttcatgcacgtgaccctgggttccgacgtggaagaggacctgaccatgacccgtaacccccagcccttcatgcgtccccacgagcgtaacggtttcaccgtgctgtgccccaagaacatgatcatcaagcccggcaagatctcccacatcatgctggacgtggccttcacctcccacgagcacttcggcctgctgtgccctaagtccatccccggcctgtccatctccggcaacctgctgatgaacggccagcagatcttcctggaagtgcaggctatccgtgaaaccgtcgagctgcgtcagtacgaccctgtggctgctctgttcttcttcgacatcgacctgctgctgcagcgtggtccccagtactccgagcaccccaccttcaccagccagtaccgtatccagggcaagctggaataccgtcacacctgggaccgtcacgacgagggtgctgctcagggcgacgacgacgtgtggacctccggttccgactccgacgaggaactggtcaccaccgagcgcaagaccccccgtgtgaccggtggtggtgctatggctggtgcttccacctccgctggtcgcaagcgcaagtccgcttcctccgctaccgcttgcaccgctggtgtcatgacccgtggtcgcctgaaggctgagtccaccgtggctcccgaagaggacactgacgaggactccgacaacgagatccacaaccccgctgtgttcacctggcccccctggcaggctggtatcctggctcgtaacctggtgcccatggtggctaccgtgcagggccagaacctgaagtaccaagagttcttctgggacgccaacgacatctaccgtatcttcgctgagctggaaggcgtgtggcagcccgctgctcagcccaagcgtcgtcgtcaccgtcaggacgctctgcctggtccctgtatcgcttccacccccaagaagcaccgcggctaaaagcttgtcgagaagtactagaggatcataatcagccataccacatttgtagaggttttacttgctttaaaaaacctcccacacctccccctgaacctgaaacataaaatgaatgcaattgttgttgttaacttgtttattgcagcttataatggttacaaataaagcaatagcatcacaaatttcacaaataaagcatttttttcactgcattctagttgtggtttgtccaaactcatcaatgtatcttatcatgtctggatctgatcactgcttgagcctagaagatccggctgctaacaaagcccgaaaggaagctgagttggctgctgtggctagctttgtttaactttaagaaggagatacatctagacctgcaggccggaatattaatagatcatggagataattaaaatgataaccatctcgcaaataaataagtattttactgttttcgtaacagttttgtaataaaaaaacctataaatattccggattattcataccgtcccaccatcgggcgcggatcccggtccgaagcgcgcggaattcgccaccatgaccatggacgagcagcagccccaggctgtgacccccgtgtacgtgggcggtttcctggctcgttacgaccagtcccccgacgaggctgagctgctgctgccacgtgacgtggtcgaacactggctgcacgctcagggccagggacagccttccctgtccgtggctctgcccctgaacatcaaccacgacgacaccgctgtcgtgggtcacgtggccgctatgcagtccgtgcgtgacggcctgttctgcctgggttgcgtgacctccccccgtttcctggaaatcgtgcgtcgtgcttccgagaagtccgagctggtgtcccgtggtcccgtgtccccactgcagcccgacaaggtggtcgagttcctgtccggttcctacgctggcctgtccctgtcatcccgtcgttgcgacgacgtcgaggctgctacctccctgagcggctccgagactacccccttcaagcacgtggccctgtgctccgtgggtcgtaggcgtggaaccctggctgtgtacggtcgtgaccccgagtgggtcacccagcgtttccccgacctgaccgctgctgaccgtgacggactgcgtgctcagtggcagcgttgcggttccaccgctgtggacgcttccggcgaccccttccgttccgactcctacggcctgctgggcaactccgtggacgctctgtacatccgcgagcgtctgcccaagctgcgttacgacaagcagctcgtgggtgtcaccgagcgcgagtcctacgtgaaggcttccgtgtcccccgaggctgcttgcgacatcaaggctgcttccgctgagcgttctggcgacagccgctcccaggctgctactcctgctgctggtgctcgtgtgccctccagctccccatccccacctgtcgagcctccctcccccgtgcaacctcctgctctgcctgcttccccctccgtgctgcctgctgagtccagcccctccctgtcaccctctgagcctgctgaggctgcctccatgtcccaccctctgagcgctgctgtgactgctgctaccgctccccctggtgctactgtggctggtgcttcccccgctgtgccttccctggcttggcctcacgacggtgtctacctgcccaaggacgctttcttctccctgctgggcgcttcccgttccgctgctcccgtgatgtaccccggtgctgtggctgctccccccagcgcttcacctgctcctctgcccctgccctcctaccccgcttcctacggtgctcccgtcgtgggttacgaccagctggctgctcgtcacttcgctgactacgtggacccccactaccccggctggggtcgtcgttacgagcccgctccttccctgcacccatcctaccctgtgccccctcctccatcacccgcttactaccgtcgtcgtgactcccccggtggcatggacgagcctccatctggatgggagcgttacgacggttcccaccgtggccagtcccaaaagcagcaccgtcacggtggttccggtggtcacaacaagcgtcgcaaggaagccgctgctgcatcctccagctccgacgaggacctgagcttccccggcgaggctgaacacggtcgtgctcgcaagcgtctgaagtcccacgtgaactccgacggaggtagcggaggccacgctggttccaaccagcagcagcaacagcgctacgacgagctgcgtgacgctatccacgagctgaagcgtgacctgttcgctgctcgccagtcctccaccctgctgtctgctgctctgccagctgccgcttcttcctcccctaccaccaccaccgtgtgcacccctactggcgagctgacctctggtggtggcgagactcccaccgctctgctgtccggtggtgctaaggtggccgagcgtgctcaggctggtgtcgtgaacgcttcctgccgtctggctaccgcttccggttccgaggctgccaccgctggtccctctaccgctggttcctcatcctgcccagcttccgtggtgctggctgccgctgctgctcaagccgccgctgcttcacagtcccccccaaaggatatggtggacctgaaccgtcgtatcttcgtggctgctctgaacaagctcgagtaataaaagcttgtcgagaagtactagaggatcataatcagccataccacatttgtagaggttttacttgctttaaaaaacctcccacacctccccctgaacctgaaacataaaatgaatgcaattgttgttgttaacttgtttattgcagcttataatggttacaaataaagcaatagcatcacaaatttcacaaataaagcatttttttcactgcattctagttgtggtttgtccaaactcatcaatgtatcttatcatgtctggatctgatcactgcttgagcctagaagatccggctgctaacaaagcccgaaaggaagctgagttggctgctgccaccgctgagcaataactatcataacccctaggggcctctaaacgggtcttgaggggttttttgctgaaaggaggaactatatccggatctgaacaggagggacagctgatagaaacagaagccactggagcacctcaaaaacaccatcatacactaaatcagtaagttggcagcatcacccgacgcactttgcgccgaataaatacctgtgacggaagatcacttcgcagaataaataaatcctggtgtccctgttgataccgggaagccctgggccaacttttggcgaaaatgagacgttgatcggcacgtaagaggttccaactttcaccataatgaaataagatcactaccgggcgtattttttgagttatcgagattttcaggagctaaggaagctaaaatggagaaaaaaatcactggatataccaccgttgatatatcccaatggcatcgtaaagaacattttgaggcatttcagtcagttgctcaatgtacctataaccagaccgttcagctggatattacggcctttttaaagaccgtaaagaaaaataagcacaagttttatccggcctttattcacattcttgcccgcctgatgaatgctcatccggaattccgtatggcaatgaaagacggtgagctggtgatatgggatagtgttcacccttgttacaccgttttccatgagcaaactgaaacgttttcatcgctctggagtgaataccacgacgatttccggcagtttctacacatatattcgcaagatgtggcgtgttacggtgaaaacctggcctatttccctaaagggtttattgagaatatgtttttcgtctcagccaatccctgggtgagtttcaccagttttgatttaaacgtggccaatatggacaacttcttcgcccccgttttcaccatgggcaaatattatacgcaaggcgacaaggtgctgatgccgctggcgattcaggttcatcatgccgtttgtgatggcttccatgtcggcagaatgcttaatgaattacaacagtactgcgatgagtggcagggcggggcgtaatttttttaaggcagttattggtgcccttaaacgcctggttgctacgcctgaataagtgataataagcggatgaatggcagaaattcgaaagcaaattcgacccggtcgtcggttcagggcagggtcgttaaatagccgcttatgtctattgctggtttaccggtttattgactaccggaagcagtgtgaccgtgtgcttctcaaatgcctgaggccagtttgctcaggctctccccgtggaggtaataattgacgatatgatcatttattctgcctcccagctgacattcatccggggtcagcaccgtttctgcggactggctttctacgtgttccgcttcctttagcagcccttgcgccctgagtgcttgcggcagcgtgaagctaattctgtcagccgttaagtgttcctgtgtcactcaaaattgctttgagaggctctaagggcttctcagtgcgttacatccctggcttgttgtccacaaccgttaaaccttaaaagctttaaaagccttatatattcttttttttcttataaaacttaaaaccttagaggctatttaagttgctgatttatattaattttattgttcaaacatgagagcttagtacgtgaaacatgagagcttagtacgttagccatgagagcttagtacgttagccatgagggtttagttcgttaaacatgagagcttagtacgttaaacatgagagcttagtacgtgaaacatgagagcttagtacgtactatcaacaggttgaactgctgatcaacagatcctctacgcggccgcggtaccataacttcgtatagcatacattatacgaagttatctggtttaaacgtacccgtagtggctatggcagggcttgccgccccgacgttggctgcgagccctgggccttcacccgaacttgggggttggggtggggaaaaggaagaaacgcgggcgtattggtcccaatggggtctcggtggggtatcgacagagtgccagccctgggaccgaaccccgcgtttatgaacaaacgacccaacacccgtgcgttttattctgtctttttattgccgtcatagcgcgggttccttccggtattgtctccttccgtgtttcagttagcctcccccatctcccggtaccgcatgctatgcatcagctgctagcttagcgagcgtccacagcctggggaccgtaacgggagtgagcgggcaggttcacacgggtctgcttcagctcagggggcaggccagcgtagtacttgtccaggtgacgcagcaggggggggtccagctggtgacgcaggcagaattccttcacagcgttgtacaggccgtagaacagggtgataccctcgggagcagcagcggtggacacgggcagacgcacagcacggttggtacgggtagcctcgttacggatagccaccaccacgttgaacagggaggggggcaccagctcgaaacccagcacgtgttcggtgaagatggaacgaccgtaggacagacgagtcaggtcgtaaccacggcacaggtcgtccacgcaagtgtacacagcgggggaaccgtcgccgcactcggagtaaccgcgcatcacggtcatccaacggggagcggtgtcggaggacagcagggtcagcagagcacgcagctggtcggggttgttgtacagcagggccagggtgtccaggaaagcgtcgtccagcagcacggagttagcagcctcgggggtcacgggacggtaacggatcagctgggacaggggaccgtccctacgggtcacgttgaccaggggacgcagccaggactcgtacttgtcgccctggaacacctctcccagcaggcaacgacgggtcagctcggggcactcagcgggcaccttctcagccacggtgggagccacggacacggtagcggaggacacgatgggcagcagcaggcagcaccacagcagagccacgggaccgggggagaaggagaaaccgcagtcgggacgacggcacatggtggctcgagatcccgggtgatcaagtcttcgtcgagtgattgtaaataaaatgtaatttacagtatagtattttaattaatatacaaatgatttgataataattcttatttaactataatatattgtgttgggttgaattaaaggtccgtatactagtatcgattcgcgacctactccggaatattaatagatcatggagataattaaaatgataaccatctcgcaaataaataagtattttactgttttcgtaacagttttgtaataaaaaaacctataaatattccggattattcataccgtcccaccatcgggcgcggatccgccaccatgaactccaaggacctgacccccttcctgaccaccctgtggctgctgctggaccactcccgtgtgcctcgtgtgcgtgctgaggaatgctgcgaagtgatcaacgtgaaccacccccccgagcgctgctacgacttcaagatgtgcaacctgttcaccgtggctctgcgttgccccgacggcgaagtgtgctactcccccgaaaagaccgctgagatccgtggtatcgtgaccaccatgacccactccctgacccgtcaagtgatccacaacaagctgaccagctgcaactacaaccccctgtacctcgaggctgacggtcgtatccgttgcggcaaggtgtccgacaaggctcagtacctgctgggtgctgctggttccgtgccctaccgttggatcaacctcgagtacgacaagatcacccgtatcgtgggcctggaccagtacctcgagtccgtgaagaagcacaagcgtctggacgtgtgccgtgctaagatgggttacatgctgcagtaaaagcttgtcgagaagtactagaggatcataatcagccataccacatttgtagaggttttacttgctttaaaaaacctcccacacctccccctgaacctgaaacataaaatgaatgcaattgttgttgttaacttgtttattgcagcttataatggttacaaataaagcaatagcatcacaaatttcacaaataaagcatttttttcactgcattctagttgtggtttgtccaaactcatcaatgtatcttatcatgtctggattgatcactgcttgagcctagaagatccggctgctaacaaagcccgaaaggaagctgagttggctgctgtggctagctttgtttaactttaagaaggagatacatctagaccggaatattaatagatcatggagataattaaaatgataaccatctcgcaaataaataagtattttactgttttcgtaacagttttgtaataaaaaaacctataaatattccggattattcataccgtcccaccatcgggcgcggatccgccaccatgctgcgtctgctgctgcgtcaccacttccactgcctgctgctgtgcgctgtgtgggctaccccctgcctggcttccccttggtccaccctgaccgctaaccagaacccctccccaccctggtccaagctgacctactccaagccccacgacgctgctaccttctactgccccttcctgtacccatccccccctcgttccccactgcagttctccggtttccagcgtgtgctgaccggtcccgagtgccgtaacgagactctgtacctgctgtacaaccgcgagggccagaccctggtcgagaggtcctccacctgggtcaagaaggtcatctggtacttgtccggtcgtaaccagaccatcctgcagcgtatgccccgtaccgcttccaagccctccgacggcaacgtgcagatctccgtcgaggacgctaagatcttcggtgctcacatggtgcccaagcagaccaagctgctgcgtttcgtggtcaacgacggcacccgttaccagatgtgcgtgatgaagctcgagtcctgggctcacgtgttccgtgactactccgtgtccttccaagtgcgcctgaccttcaccgaggctaacaaccagacctacaccttctgcacccaccccaacctgatcgtgtaaaagcttgtcgagaagtactagaggatcataatcagccataccacatttgtagaggttttacttgctttaaaaaacctcccacacctccccctgaacctgaaacataaaatgaatgcaattgttgttgttaacttgtttattgcagcttataatggttacaaataaagcaatagcatcacaaatttcacaaataaagcatttttttcactgcattctagttgtggtttgtccaaactcatcaatgtatcttatcatgtctggatctgatcactgcttgagcctagaagatccggctgctaacaaagcccgaaaggaagctgagttggctgctgggtgcctaatgagtgagctaactcacattaattgcccggaatattaatagatcatggagataattaaaatgataaccatctcgcaaataaataagtattttactgttttcgtaacagttttgtaataaaaaaacctataaatattccggattattcataccgtcccaccatcgggcgcggatccgccaccatgcgtctgtgccgtgtgtggctgtccgtgtgcctgtgcgctgtggtgctgggccagtgccagcgtgaaaccgctgagaagaacgactactaccgtgtgccccactactgggacgcttgctcccgtgctctgcccgaccagacccgttacaagtacgtcgagcagctggtggacctgaccctgaactaccactacgacgcttcccacggcctggacaacttcgacgtgctgaagcgtatcaacgtgaccgaggtgtccctgctgatctccgacttccgtcgtcagaaccgtcgtggtggcaccaacaagcgtaccaccttcaacgctgctggttccctggctccccacgctcgttccctcgagttctccgtgcgtctgttcgctaactaaaagcttgtcgagaagtactagaggatcataatcagccataccacatttgtagaggttttacttgctttaaaaaacctcccacacctccccctgaacctgaaacataaaatgaatgcaattgttgttgttaacttgtttattgcagcttataatggttacaaataaagcaatagcatcacaaatttcacaaataaagcatttttttcactgcattctagttgtggtttgtccaaactcatcaatgtatcttatcatgtctggatctgatcactgcttgagcctagaagatccggctgctaacaaagcccgaaaggaagctgagttggctgctgccaccgctgagcaataactatcataacccccggaatattaatagatcatggagataattaaaatgataaccatctcgcaaataaataagtattttactgttttcgtaacagttttgtaataaaaaaacctataaatattccggattattcataccgtcccaccatcgggcgcggatcccggtccgaagcgcgcggaattcaaaggcctaccgtcgacgccaccatggaatcccgtatctggtgcctggtcgtgtgcgtgaacctgtgcatcgtgtgcctgggtgctgctgtgtcctcctcctccacccgtggcacctccgctacccactcccaccactcctcccacaccacctccgccgctcactcccgttccggttccgtgtcccagcgtgtgacctcctcccagaccgtgtcccacggtgtcaacgagactatctacaacaccaccctgaagtacggcgacgtcgtgggtgtcaacaccaccaagtacccctaccgtgtgtgctccatggctcagggcaccgacctgatccgtttcgagcgtaacatcgtgtgcacctccatgaagcccatcaacgaggacctggacgagggtatcatggtggtgtacaagcgcaacatcgtggctcacaccttcaaggtccgcgtgtaccagaaggtgctgaccttccgtcgttcctacgcttacatccacaccacttacctgctgggttccaacaccgagtacgtggcccctcccatgtgggagatccaccacatcaactcccactcccagtgctactcctcttactcccgtgtgatcgctggcaccgtgttcgtggcttaccaccgtgactcctacgagaacaagaccatgcagctgatgcccgacgactactccaacacccactccacccgttacgtgaccgtgaaggaccagtggcactcccgtggttccacctggctgtaccgtgaaacctgcaacctgaactgcatggtcaccatcaccaccgctcgttccaagtacccttaccacttcttcgctacctccaccggcgacgtggtggacatctcccccttctacaacggtactaaccgtaacgcttcctacttcggcgagaacgctgacaagttcttcatcttccccaactacaccatcgtgtccgacttcggtcgtcccaactccgctctggaaacccaccgtctggtggctttcttggagcgtgctgactccgtgatctcctgggacatccaggacgagaagaacgtgacctgccagctgaccttctgggaggcttccgagcgtaccatccgttccgaggctgaggactcctaccacttctccagcgctaagatgaccgctaccttcctgtccaagaaacaagaggtcaacatgtccgactccgccctggactgcgtgcgtgacgaggctatcaacaagctgcagcagatcttcaacacctcctacaaccagacctacgagaagtacggaaacgtgtccgtgttcgagactaccggtggcctggtggtgttctggcagggtatcaagcagaagtccctggtcgagctggaacgtctggctaaccgttcctccctgaacctgacccacaaccgtaccaagcgttccaccgacggcaacaacgctactcacctgtccaacatggaatccgtgcacaacctggtgtacgctcagctgcagttcacctacgacaccctgcgcggttacatcaaccgtgctctggctcagatcgctgaggcttggtgcgtggaccagcgtcgtaccctggaagtgttcaaggaactgtccaagatcaacccctccgctatcctgtccgccatctacaacaagcctatcgctgctcgtttcatgggcgacgtgctgggcctggcttcctgcgtgaccatcaaccagacttccgtgaaggtgctgcgtgacatgaacgtgaaggaatcccccggtcgttgctactcccgtcccgtggtcatcttcaacttcgctaactcctcctacgtgcagtacggccagctgggcgaggacaacgagatcctgctgggcaaccaccgtaccgaggaatgccagctgccctccctgaagatcttcatcgctggcaactccgcttacgaatacgtggactacctgttcaagcgcatgatcgacctgtcctccatctctaccgtggactccatgatcgctctggacatcgaccccctggaaaacaccgacttccgtgtgctggaactgtactcccagaaggaactgcgttccatcaacgtgttcgacctggaagagatcatgcgcgagttcaactcctacaagcagcgtgttaagtacgtcgaggacaaggtggtggaccccctgcccccctacctgaagggactggacgacctgatgtccggcctgggagctgccggcaaggctgtgggtgtcgctatcggtgctgtgggtggtgctgtggcttccgtggtcgagggtgtcgccaccttcctgaagaaccccttcggtgctttcaccatcatcctggtggctatcgctgtggtcatcatcatctacctgatctacacccgtcagcgtcgtctgtgcatgcagcccctgcagaacctgttcccctacctggtgtccgctgacggtactaccgtgacctccggcaacaccaaggacacctccctgcaggctcccccatcctacgaggaatccgtctacaactccggtcgcaagggtcccggtcccccttcctccgacgcttctaccgctgctcccccatacaccaacgagcaggcttaccagatgctgctggctctcgtgcgtctggacgctgagcagcgtgcacagcagaacggcaccgactccctggacggccagaccggaacccaggacaagggccagaagcccaacctgctggaccgtctgcgtcaccgcaagaacggttaccgtcacctgaaggactccgacgaggaagagaacgtctaaggcgcgccaagcttgtcgagaagtactagagatcataatcagccataccacatttgtagaggttttacttgctttaaaaaacctcccacacctccccctgaacctgaaacataaaatgaatgcaattgttgttgttaacttgtttattgcagcttataatggttacaaataaagcaatagcatcacaaatttcacaaataaagcatttttttcactgcattctagttgtggtttgtccaaactcatcaatgtatcttatcatgtctggatctgatcactgcttgagcctagaagatccggctgctaacaaagcccgaaaggaagctgggaatattaatagatcatggagataattaaaatgataaccatctcgcaaataaataagtattttactgttttcgtaacagttttgtaataaaaaaacctataaatattccggattattcataccgtcccaccatcgggcgcggatccgccaccatgcgtcccggcctgccctcctacctgatcgtgctggctgtgtgcctgctgtcccacctcctgtcctcccgttacggtgctgaggctatctccgagcccctggacaaggctttccacctcctgctgaacacctacggtcgtcctatccgtttcctgcgcgagaacaccacccagtgcacctacaactcctccctgcgcaactccaccgtcgtccgcgagaacgctatctccttcaacttcttccagtcctacaaccagtactacgtgttccacatgccccgttgcctgttcgctggtcccctggctgagcagttcctgaaccaggtggacctgaccgagactctcgagcgttaccagcagcgtctgaacacttacgctctggtgtccaaggacctggcttcctaccgttccttcagccagcagctgaaggctcaggactccctgggcgagcagcccaccactgtgcctccccctatcgacctgtccatcccccacgtgtggatgcccccccagaccactcctcacggctggaccgagtcccacaccacctccggactgcaccgtccccacttcaaccagacctgcatcctgttcgacggtcacgacctgctgttctccaccgtgaccccctgcctgcaccagggcttctacctcatcgacgagctgcgttacgtgaagatcaccctgaccgaggatttcttcgtggtcaccgtgtccatcgacgacgacacccccatgctgctgatcttcggtcacctcccccgtgtgctgttcaaggctccctaccagcgtgacaacttcatcctgcgtcagaccgagaagcacgagctgctggtgctggtcaagaaggaccagctgaaccgtcactcttacctgaaggaccccgacttcctggacgctgctctggacttcaactacctggacctgtccgctctgctgaggaactccttccaccgttacgctgtggacgtgctgaagtccggtcgttgccagatgctggaccgtcgtaccgtcgagatggctttcgcttacgccctggctctgttcgctgctgctcgtcaagaagaggctggcgctcaggtgtccgtgccccgtgctctggaccgtcaggctgctctgctgcagatccaagagttcatgatcacttgcctgtcccagaccccccctcgtaccaccctgctgctgtaccccaccgctgtggacctggctaagcgtgctctgtggacccccaaccagatcaccgacatcacctccctcgtgcgtctggtgtacatcctgtccaagcagaaccagcagcacctgatcccccagtgggctctgcgtcagatcgctgacttcgctctgaagctgcacaagacccacctggcttcattcctcagcgctttcgctcgccaagagctgtacctgatgggttccctggtgcactccatgctggtgcacaccaccgagcgtcgcgagatcttcatcgtggaaaccggcctgtgctccctggccgagctgtcccacttcacccagctgctggctcacccccaccacgagtacctgtccgacctgtacaccccctgctcctcttccggtcgtcgtgaccactccctggaacgtctgacccgtctgttccccgacgctaccgtgcctaccaccgtgcctgctgctctgtccatcctgtctaccatgcagccctccaccctggaaaccttccccgacctgttctgcctgcctctgggcgagtccttctccgctctgaccgtgtccgagcacgtgtcctacgtggtcaccaaccagtacctgatcaagggcatctcctaccccgtgtccaccaccgtcgtgggccagtccctgatcatcacccagaccgactcccagaccaagtgcgagctgacccgtaacatgcacaccactcactccatcaccgctgctctgaacatctccctcgagaactgcgctttctgccagtccgctctgttggagtacgacgacactcagggtgtcatcaacatcatgtacatgcacgactccgacgacgtgctgttcgctctggacccctacaacgaggtggtggtgtcctccccccgtacccactacctgatgctgctgaagaacggcaccgtgctggaagtgaccgacgtggtggtggacgctaccgaccgtctgctgatgatgtccgtgtacgctctgtccgctatcatcggcatctacctgctgtaccgtatgctgaagacctgctaaggcgccaagctttgtcgagaagtactagaggatcataatcagccataccacatttgtagaggttttacttgctttaaaaaacctcccacacctccccctgaacctgaaacataaaatgaatgcaattgttgttgttaacttgtttattgcagcttataatggttacaaataaagcaatagcatcacaaatttcacaaataaagcatttttttcactgcattctagttgtggtttgtccaaactcatcaatgtatcttatcatgtctggatctgatcactgcttgagcctagaagatccggctgctaacaaagcccgaaaggaagctgagttggctgctgccaccgctgagcaataactatcataacccctaggagatccgaaccagataagtgaaatctagttccaaactattttgtcatttttaattttcgtattagcttacgacgctacacccagttcccatctattttgtcactcttccctaaataatccttaaaaactccatttccacccctcccagttcccaactattttgtccgcccaca

SEQ ID NO: 55 - DNA, 32059 bp, Artificial Sequence
  Synthetic construct
ttgttccagtttggaacaagagtccactattaaagaacgtggactccaacgtcaaagggcgaaaaaccgtctatcagggcgatggcccactacgtgaaccatcaccctaatcaagttttttggggtcgaggtgccgtaaagcactaaatcggaaccctaaagggagcccccgatttagagcttgacggggaaagccggcgaacgtggcgagaaaggaagggaagaaagcgaaaggagcgggcgctagggcgctggcaagtgtagcggtcacgctgcgcgtaaccaccacacccgccgcgcttaatgcgccgctacagggcgcgtccattcgccattcaggctgcgcaactgttgggaagggcgatcggtgcgggcctcttcgctattacgccagctggcgaaagggggatgtgctgcaaggcgattaagttgggtaacgccagggttttcccagtcacgacgttgtaaaacgacggccagtgcatagaccagccgcgtaacctggcaaaatcggttacggttgagtaataaatggatgccctgcgtaagcgggtgtgggcggacaataaagtcttaaactgaacaaaatagatctaaactatgacaataaagtcttaaactagacagaatagttgtaaactgaaatcagtccagttatgctgtgaaaaagcatactggacttttgttatggctaaagcaaactcttcattttctgaagtgcaaattgcccgtcgtattaaagaggggcgtggccaagggcatggtaaagactatattcgcggcgttgtgacaatttaccgaacaactccgcggccgggaagccgatctcggcttgaacgaattgttaggtggcggtacttgggtcgatatcaaagtgcatcacttcttcccgtatgcccaactttgtatagagagccactgcgggatcgtcaccgtaatctgcttgcacgtagatcacataagcaccaagcgcgttggcctcatgcttgaggagattgatgagcgcggtggcaatgccctgcctccggtgctcgccggagactgcgagatcatagatatagatctcactacgcggctgctcaaacttgggcagaacgtaagccgcgagagcgccaacaaccgcttcttggtcgaaggcagcaagcgcgatgaatgtcttactacggagcaagttcccgaggtaatcggagtccggctgatgttgggagtaggtggctacgtctccgaactcacgaccgaaaagatcaagagcagcccgcatggatttgacttggtcagggccgagcctacatgtgcgaatgatgcccatacttgagccacctaactttgttttagggcgactgccctgctgcgtaacatcgttgctgctgcgtaacatcgttgctgctccataacatcaaacatcgacccacggcgtaacgcgcttgctgcttggatgcccgaggcatagactgtacaaaaaaacagtcataacaagccatgaaaaccgccactgcgccgttaccaccgctgcgttcggtcaaggttctggaccagttgcgtgagcgcatacgctacttgcattacagtttacgaaccgaacaggcttatgtcaactgggtttgtgccttcatccgtttccacggtgtgcgtcacccggcaaccttgggcagcagcgaagtcgaggcatttctgtcctggctggcgaacgagcgcaaggtttcggtctccacgcatcgtcaggcattggcggccttgctgttcttctacggcaaggtgctgtgcacggatctgcccttgcttcaggagatcggtagacctcggccgtcgcggcgcttgccggtggtgctgaccccggatgaagtggttcgcatcctcggttttctggaaggcgagcatcgtttgttcgcccaggactctagctatagttctagtggttggctacagctttgtttgtactatcaacaggttgaactgctgatcaacagatcctctacgcggccgcggtaccataacttcgtatagcatacattatacgaagttatctggtttaaacgtacccgtagtggctatggcagggcttgccgccccgacgttggctgcgagccctgggccttcacccgaacttgggggttggggtggggaaaaggaagaaacgcgggcgtattggtcccaatggggtctcggtggggtatcgacagagtgccagccctgggaccgaaccccgcgtttatgaacaaacgacccaacacccgtgcgttttattctgtctttttattgccgtcatagcgcgggttccttccggtattgtctccttccgtgtttcagttagcctcccccatctcccggtaccgcatgctatgcatcagctgctagcttactgcagccaccaccacagggagttcagggtggacaggttcacagcacgacggtgctcagggggggtcaggttgccgtaggtggaggactgcaggctgaagttacggatctcagacaggaacagcagggagtccaggtagtcccacatggggtcgatgaaggtgcgctggaaacgggtggatggggaggtgggggtggtcttgttgttgtcggaagcagtctcgttctcgacgggcatggtgtcgttgtagtacagggaggacatgtccagggtgccgtagatggtgtagggagtctcgttacggatcagcacgtgagtgttcttcatgaactcggacacagcggtacggttacggttgggcttgcagaagggctcgtcacggtaacgcagggtggtgtacacccaggtagccaggtccttcagctgagtggtcaggatagacttcatgaagttctcgtcgggacggtaaccgatggtagaggtggggatacgggtgggcacgatgggggagtaggtcacgttggtggaaacgttgaagatggtggaggtgtaggaggagtagggggtagtagtgctgacgcgggacttcttggagatggacttcacgggagcctgcttgcgcttcagcttgcgcatggtgttcttcagcttggtggagttgatgtacttgggcacacggaagatgttacgggacatagcgttgaccaggtagaaggaacgggtgcagttgcgctgagcgtaacgcagcagcagagcagccaggcccaggaagtagatagtctgggagtccacgttgaccttggaggggcccacgtacagcttggtgttccaacggggcacgttgaagaacatggggttgaaggtggtgaagttgccgcagttttcctcgccggtgttgttacgacgggacacgttcagcatctcggacaggcaggtcatggaggggatggtgccgcaagaggggggacggaaggtgatcttctggccggtgtggttgtactcggagtacacgtacttagcgggcttgcgcagctgggtggtgtggaagtcgaaccacaggtgggtgatggagtggttacggatgggaccagccaggatggagttgggggggaactgcttcatctcgacggtgatgttgtacagcttctgctggctggggaaggtgaagaacttgtagtagtcgccggtcttggaagccagctcttgcaggatacgcagcttcagctggcgttcctcttccttagccttctgggacttcacacggaaacgagccacagcgatcttgcagttgatgaagctgaacagcaggaaggtcagggacatcaggaagaacaggttgaacacgccacgcatctcgcccttgcgacccatggtggcctcgagatcccgggtgatcaagtcttcgtcgagtgattgtaaataaaatgtaatttacagtatagtattttaattaatatacaaatgatttgataataattcttatttaactataatatattgtgttgggttgaattaaaggtccgtatactagtatcgattcgcgacctactccggaatattaatagatcatggagataattaaaatgataaccatctcgcaaataaataagtattttactgttttcgtaacagttttgtaataaaaaaacctataaatattccggattattcataccgtcccaccatcgggcgcggatccgccaccatggaaaactggtccgctctggaactgctgcccaaggtcggaatccctaccgacttcctgacccacgtcaagacctccgctggcgaggaaatgttcgaggctctgaggatctactacggcgacgaccccgagcgttacaacatccacttcgaggctatcttcggcaccttctgcaaccgtctggaatgggtgtacttcctgacttccggcctggctgctgctgctcacgctatcaagttccacgacctgaacaagctgaccaccggcaagatgctgttccacgtgcaagtgccccgtgtggcttccggtgctggcctgcctacctcccgtcagaccaccatcatggtcaccaagtactccgagaagtcccccatcaccatccctttcgagctgtccgctgcttgcctgacttacctgcgtgaaaccttcgagggcaccatcctggacaagatcctgaacgtcgaggctatgcacaccgtgctgcgtgctctgaagaacaccgctgacgctatggaacgtggcctgatccacagcttcctccagaccctgctgaggaaggctcccccctacttcgtggtgcagaccctggtcgagaacgctaccctggctcgtcaggctctgaaccgtatccagcgctccaacatcctgcagtccttcaaggctaagatgctggctaccctgttcctgctgaaccgtacccgtgaccgtgactacgtgctgaagttcctgacccgtctggctgaggctgctaccgactccatcctcgacaaccctactacctacaccacctcctccggtgctaagatctccggtgtcatggtgtccaccgctaacgtgatgcagatcatcatgtccctgctgtcctcccacatcactaaggaaaccgtgtccgctcccgctacctacggcaacttcgtgctgtcccccgagaacgctgtgaccgctatctcctaccactctatcctggctgacttcaactcctacaaggctcacctgacctccggccagccccacctccccaacgactccctgagccaggctggtgctcactccctgacccccctgtccatggacgtgatccgtctgggcgaaaagaccgtgatcatggaaaacctgcgtcgcgtgtacaagaacaccgacaccaaggaccccctggaacgtaacgtggacctgaccttcttcttccccgtgggcctgtacctgcccgaggaccgtggttacaccaccgtcgagtccaaggtcaagctgaacgacaccgtgcgtaacgctctgcccaccaccgcttacctgctgaacagggaccgtgctgtgcaaaagatcgacttcgtggacgctctcaagaccctgtgccaccccgtgctgcacgagcctgctccatgcctgcaggctttcaccgagcgtggtcccccatccgagcccgctatgcagcgtctgctggaatgccgtttccagcaagagcccatgggtggtgctgctcgtcgtatcccccacttctaccgtgtgcgccgcgaggtgccccgtaccgtgaacgagatgaagcaggacttcgtggtcaccgacttctacaaggttggaaacatcaccctgtacaccgagctgcaccctttcttcgacttcacccactgccaagagaactccgagactgtggctctgtgcaccccccgtatcgtgatcggcaacctgcccgacggcctggctcccggtcccttccacgagctgaggacctgggagatcatggaacacatgcgcctgcgtcccccacccgactacgaggaaaccctgcgtctgttcaagaccaccgtgacctcccccaactaccccgagctgtgctacctggtggacgtgctggtgcacggcaacgctgacgctttcctgctgatccgcgctttcatcgctcgttgcatcgtgaacatgttccacacccgtcagctgctggtgttcgctcactcctacgctctggtcaccctgatcgctgagcacctggctgacggtgctctgcccccccagctcctgttccactaccgtaacctggtggctgtgctgcgcctggtcacccgtatctccgctctgcccggcctgaacaacggccagctggctgaggaacccctgtccgcttacgtgaacgctctgcacgaccacaggctgtggccccccttcgtgacccacctccctcgtaacatggaaggtgtccaggtggtggctgatcgtcagcccctgaaccccgctaacatcgaggctcgtcaccacggtgtctccgacgtgccccgtctgggtgctatggacgctgacgagcccctgttcgtggacgactaccgtgctaccgacgacgagtggaccctgcaaaaggtgttctacctgtgcctgatccccgctatgaccaacaaccgtgcttgcggcctgggcctgaacctcaagactctgctggtggacctgttctaccgtcccgccttcctgctcatgcccgctgctaccgctgtgtccacctccggcaccacctccaaggaatccacctctggtgtcacccccgaggactccgtggctgctcagcgtcaggctgtgggcgagatgctgaccgagctggtcgaggacgtggccaccgacgctcacacccctctgctgcaggcttgccgcgagctgttcctggctgtgcagttcgtgggcgagcacgtgaaggtgctggaagtgcgtgctcccctggaccacgctcagaggcagggactgcccgacttcatctcccgtcagcatgtgctgtacaacggttgctgcgtcgtgaccgctcctaagaccctgatcgagtactccctgcccgtgcccttccaccgtttctactccaaccccaccatctgcgctgctctgtccgacgacatcaagcgttacgtgaccgagttcccccactaccatagacacgatggtggtttccccctgcccaccgctttcgctcacgagtaccacaactggctgcgtagccccttctcccgttactccgctacctgccccaacgtgctgcactccgtgatgaccctggctgctatgctgtacaagatctcccccgtgtccctggtgctgcagaccaaggctcacatccaccccggtttcgctctgaccgctgtgcgtaccgacaccttcgaggtggacatgctgctgtactccggcaagtcctgcacctccgtcatcatcaacaaccccatcgtgaccaaggaagagagggacatctccaccacctaccacgtgacccagaacatcaacaccgtggacatgggcctgggttacacctccaacacttgcgtggcctacgtgaaccgcgtccgcaccgacatgggtgtccgtgtgcaggacctgttccgtgtgttccccatgaacgtgtaccgccacgatgaggtggaccgttggatcaggcacgctgctggcgtcgagcgtccccagctgctggacaccgagactatctccatgctgaccttcggttccatgtccgagcgcaacgctgctgctaccgtgcacggccagaaggctgtctgcgagctgatcctgacccctgtgactatggacgtgaactacttcaagatcaccaacaaccctcgtggtcgtgcttcctgcatgctgggcgtggacccctacgacaccgaggctgccaccaaggctatctacgaccaccgcgaggctgacgctcagaccttcgctgctacccacaacccatgggcttcccaggctggttgcctgtccgacgtcctgtacaacacccgtcaccgcgagcgtctgggctacaactccaagttctactccccctgcgctcagtacttcaacaccgaggaaatcatcgctgccaacaagaccctcttcaagaccatcgacgagtacctgctgcgcgctaaggactgcatccgtggcgacaccgacactcagtacgtgtgcgtcgagggaaccgagcagctgatcgagaacccttgccgtctgacccaagaggctctgcccatcctgtccaccaccaccctggctctgatggaaactaagctgaagggtggcgctggtgctttcgctacctccgagactcacttcggcaactacgtcgtgggagagatcatccccctgcagcagtccatgctgttcaacagctaagagctcaagcttgtcgagaagtactagaggatcataatcagccataccacatttgtagaggttttacttgctttaaaaaacctcccacacctccccctgaacctgaaacataaaatgaatgcaattgttgttgttaacttgtttattgcagcttataatggttacaaataaagcaatagcatcacaaatttcacaaataaagcatttttttcactgcattctagttgtggtttgtccaaactcatcaatgtatcttatcatgtctggatctgatcactgcttgagcctagaagatccggctgctaacaaagcccgaaaggaagctgagttggctgctgcccaccgctgagcaataactatcataacccccggaatattaatagatcatggagataattaaaatgataaccatctcgcaaataaataagtattttactgttttcgtaacagttttgtaataaaaaaacctataaatattccggattattcataccgtcccaccatcgggcgcggatccgccaccatggctgctatggaagctaacatcttctgcaccttcgaccacaagctgtctatcgctgacgtgggcaagctgaccaagctggtggctgctgtggtgcccatcccccagcgtctgcacctgatcaagcactaccagctgggcctgcaccagttcgtggaccacacccgtggttacgtgcgtctgcgtggcctgctgcgtaacatgaccctgaccctgatgcgtcgtgtcgagggcaaccagatcctgctgcacgtgcccacccacggcctgctgtacaccgtgctgaacaccggtcccgtgacctgggagaagggcgacgctctgtgcgtgctgccccccctgttccacggtcccctggctcgtgaaaacctgttgaccctgggccagtgggagctggtgctgccctggatcgtgcccatgcccctggctctggaaatcaaccagcgcctgctgatcatgggcctgttctccctggaccgttcctacgaagaagtgaaggctgctgtccagcagctgcagaccatcaccttccgtgacgctaccttcaccatccccgaccccgtgatcgaccagcacctcctgatcgacatgaagaccgcttgcctgtccatgtccatggtggctaacctggcttccgagctgaccatgacctacgtccgcaagctggctttggaggactcttccatgctgctggtcaagtgccaagagctgctgatgcgtctggaccgcgagcgttccgtgggcgagcctcgtactcccgctcgtcctcagcacgtgtcccccgacgacgagatcgctcgtctgtccgctctgttcgtgatgctgcgtcagctggacgacctgatccgcgagcaggtcgtgttcaccgtgtgcgacgtgagcccagacaacaagtccgctacctgcatcttcaagggctaaggcgcgccaagcttgtcgagaagtactagaggatcataatcagccataccacatttgtagaggttttacttgctttaaaaaacctcccacacctccccctgaacctgaaacataaaatgaatgcaattgttgttgttaacttgtttattgcagcttataatggttacaaataaagcaatagcatcacaaatttcacaaataaagcatttttttcactgcattctagttgtggtttgtccaaactcatcaatgtatcttatcatgtctggatctgatcactgcttgagcctagaagatccggctgctaacaaagcccgaaaggaagctgagttggctgctgccaccgctgagcaataactatcataacccccggaatattaatagatcatggagataattaaaatgataaccatctcgcaaataaataagtattttactgttttcgtaacagttttgtaataaaaaaacctataaatattccggattattcataccgtcccaccatcgggcgcggatcccggtccgaagcgcgcggaattcaaaggcctgccaccatggaaatgaacaaggtgctgcatcaggatctggtgcaggctacccgtcgtatcctgaagctgggcccctccgagctgcgtgtgaccgacgctggcctgatctgcaagaaccccaactactccgtgtgcgacgctatgctcaagaccgacaccgtgtactgcgtcgagtacctgctgtcctactgggagtcccgtaccgaccacgtgccctgcttcatcttcaagaacaccggttgcgctgtgtccctgtgctgcttcgtgcgtgctcccgtgaagctggtgtcccctgctcgtcacgtgggcgagttcaacgtgctgaaggtcaacgagtccctgatcgtgaccctgaaggacatcgaggaaatcaagccctccgcttacggtgtcctgactaagtgcgtcgtccgcaagtccaactccgcttccgtgttcaacatcgagctgatcgctttcggtcccgagaacgagggcgagtacgagaacctgctgcgcgagctgtacgctaagaaggctgcttccacctccctggctgtgcgtaaccacgtgaccgtgtcctcccactccggttccggtccctccctgtggcgtgctcgtatgtccgctgctctgacccgtaccgctggcaagcgctcctccaggactgctagccctccaccaccacctcctcgtcaccctagctgctctcccactatggtggctgctggtggagctgctgctggtcctagacctccccctcctcctatggctgctggatcctggcgtctgtgccgttgcgaggcttgcatgggccgttgcggttgcgcttccgagggcgacgctgacgaggaagaggaagagttgctggctctggctggcgagggcaaggctgctgctgccgctgccggtcaagacgtcggtggttccgctcgtcgtcccctcgaggaacacgtgtcccgtcgtcgtggtgtctccacccaccaccgtcaccccccttccccaccttgcgctccctccctggaacgtaccggttaccgttgggctccttcctcctggtggcgcgctcgttctggtccttcccgtccccagtccggtccctggctgcctgctcgtttcgctaccctgggtcccctggtcctggctctgctgttggtgctggccctgctgtggcgtggtcacggtcaatcccccagccccacccgttccgctcaccgtgactaaaagcttgtcgagaagtactagaggatcataatcagccataccacatttgtagaggttttacttgctttaaaaaacctcccacacctccccctgaacctgaaacataaaatgaatgcaattgttgttgttaacttgtttattgcagcttataatggttacaaataaagcaatagcatcacaaatttcacaaataaagcatttttttcactgcattctagttgtggtttgtccaaactcatcaatgtatcttatcatgtctggatctgatcactgcttgagcctagaagatccggctgctaacaaagcccgaaaggaagctgagttggctgctgtggctagctttgtttaactttaagaaggagatacatctagaaatattaatagatcatggagataattaaaatgataaccatctcgcaaataaataagtattttactgttttcgtaacagttttgtaataaaaaaacctataaatattccggattattcataccgtcccaccatcgggcgcggatcccggtccgaagcgcgcggaattcaaaggcctacgtcgacgccaccatgtccaacaccgctcccggtcccaccgtggctaacaagcgtgacgagaagcaccgtcacgtggtcaacgtggtgctcgagctgcccaccgagatctccgaggctacccaccccgtgctggctaccatgctgtccaagtacacccgtatgtcctccctgttcaacgacaagtgcgctttcaagctggacctgctgcgtatggtggctgtgtcccgtacccgtcgctaaaagcttgtcgagaagtactagaggatcataatcagccataccacatttgtagaggttttacttgctttaaaaaacctcccacacctccccctgaacctgaaacataaaatgaatgcaattgttgttgttaacttgtttattgcagcttataatggttacaaataaagcaatagcatcacaaatttcacaaataaagcatttttttcactgcattctagttgtggtttgtccaaactcatcaatgtatcttatcatgtctggatctgatcactgcttgagcctagaagatccggctgctaacaaagcccgaaaggaagctgagttggctgctgggtgcctaatgagtgagctaactcacattaattgcccggaatattaatagatcatggagataattaaaatgataaccatctcgcaaataaataagtattttactgttttcgtaacagttttgtaataaaaaaacctataaatattccggattattcataccgtcccaccatcgggcgcggatcccggtccgaagcgcgcggaattcgccaccatggacgctcgtgctgtggctaagcgtccccgtgaccccgctgacgaggacaacgagctggtcaccgctctgaaggctaagcgtgaagtgaacaccatctccgtgcgttacctgtaccacgctgaccaccaggctctgaccgctcgtttcttcgtgcccgagggcctggtcgagttcgaggctcagcccggtgctctgctgatccgtatggaaaccggttgcgactccccccgtcacctgtacatctccctgtacctgctgggtatccgtgcttccaacgtgtccgcttccacccgttgcctgctcgagtccgtgtacaccgcttccgctgctcgtgctgctctgcagtggctggacctgggtccccacctcctgcaccgtcgtctggaaaccctgggttgcgtcaagaccgtgtccctgggtatcacctccctgctgacctgcgtgatgcgcggctacctgtacaacaccctcaagaccgaggtgttcgctctgatgatccccaaggacatgtacctgacctgggaggaaacccgcggtcgtctgcagtacgtgtacctgatcatcgtgtacgactacgacggtcccgagactcgtcccggtatctacgtgctgacctcctctatcgctcactggcagaccctggtggacgtggcccgtggaaagttcgctcgtgaacgctgctccttcgtgaaccgtcgtatcacccgtccccgtcagatccccctgtgcaccggtgtcatccaaaagctgggctggtgcctggctgacgacatccacacctcattcctcgtgcacaaggaactgaagctgtccgtcgtgcgtctggacaacttctccgtcgagctgggcgacttccgcgagttcgtgcagctgttgaattttgaccttcttaagcttgcgggagacgtcgagtccaaccctgggcccatggaatcccgtggtcgtcgttgccccgagatgatctccgtgctgggtcccatctccggtcacgtcctgaaggctgtgttctcccgtggcgacacccccgtgctgccccacgaaactcgtctgctgcagaccggtatccacgtgcgtgtgtcccagccctccctgatcctggtgtcccagtacacccccgactccaccccttgccaccgcggagacaaccagctgcaggtccagcacacctacttcaccggttccgaggtcgagaacgtgtccgtgaacgtgcacaaccccaccggtcgttccatctgcccctcccaagagcccatgtccatctacgtgtacgctctgcccctgaagatgctgaacatcccctccatcaacgtgcaccactacccctccgctgctgagcgcaagcaccgtcacctccccgtggctgacgctgtgatccacgcttccggcaagcagatgtggcaggctcgtctgaccgtgtccggcctggcttggacccgtcagcagaaccagtggaaggaacccgacgtgtactacacctccgctttcgtgttccccaccaaggacgtggccctgcgtcacgtcgtgtgcgctcacgaactcgtgtgctccatggaaaacacccgtgctaccaagatgcaagtgatcggcgaccagtacgtgaaggtgtacctggaatccttctgcgaggacgtgccctccggcaagctgttcatgcacgtgaccctgggttccgacgtggaagaggacctgaccatgacccgtaacccccagcccttcatgcgtccccacgagcgtaacggtttcaccgtgctgtgccccaagaacatgatcatcaagcccggcaagatctcccacatcatgctggacgtggccttcacctcccacgagcacttcggcctgctgtgccctaagtccatccccggcctgtccatctccggcaacctgctgatgaacggccagcagatcttcctggaagtgcaggctatccgtgaaaccgtcgagctgcgtcagtacgaccctgtggctgctctgttcttcttcgacatcgacctgctgctgcagcgtggtccccagtactccgagcaccccaccttcaccagccagtaccgtatccagggcaagctggaataccgtcacacctgggaccgtcacgacgagggtgctgctcagggcgacgacgacgtgtggacctccggttccgactccgacgaggaactggtcaccaccgagcgcaagaccccccgtgtgaccggtggtggtgctatggctggtgcttccacctccgctggtcgcaagcgcaagtccgcttcctccgctaccgcttgcaccgctggtgtcatgacccgtggtcgcctgaaggctgagtccaccgtggctcccgaagaggacactgacgaggactccgacaacgagatccacaaccccgctgtgttcacctggcccccctggcaggctggtatcctggctcgtaacctggtgcccatggtggctaccgtgcagggccagaacctgaagtaccaagagttcttctgggacgccaacgacatctaccgtatcttcgctgagctggaaggcgtgtggcagcccgctgctcagcccaagcgtcgtcgtcaccgtcaggacgctctgcctggtccctgtatcgcttccacccccaagaagcaccgcggctaaaagcttgtcgagaagtactagaggatcataatcagccataccacatttgtagaggttttacttgctttaaaaaacctcccacacctccccctgaacctgaaacataaaatgaatgcaattgttgttgttaacttgtttattgcagcttataatggttacaaataaagcaatagcatcacaaatttcacaaataaagcatttttttcactgcattctagttgtggtttgtccaaactcatcaatgtatcttatcatgtctggatctgatcactgcttgagcctagaagatccggctgctaacaaagcccgaaaggaagctgagttggctgctgtggctagctttgtttaactttaagaaggagatacatctagacctgcaggccggaatattaatagatcatggagataattaaaatgataaccatctcgcaaataaataagtattttactgttttcgtaacagttttgtaataaaaaaacctataaatattccggattattcataccgtcccaccatcgggcgcggatcccggtccgaagcgcgcggaattcgccaccatgaccatggacgagcagcagccccaggctgtgacccccgtgtacgtgggcggtttcctggctcgttacgaccagtcccccgacgaggctgagctgctgctgccacgtgacgtggtcgaacactggctgcacgctcagggccagggacagccttccctgtccgtggctctgcccctgaacatcaaccacgacgacaccgctgtcgtgggtcacgtggccgctatgcagtccgtgcgtgacggcctgttctgcctgggttgcgtgacctccccccgtttcctggaaatcgtgcgtcgtgcttccgagaagtccgagctggtgtcccgtggtcccgtgtccccactgcagcccgacaaggtggtcgagttcctgtccggttcctacgctggcctgtccctgtcatcccgtcgttgcgacgacgtcgaggctgctacctccctgagcggctccgagactacccccttcaagcacgtggccctgtgctccgtgggtcgtaggcgtggaaccctggctgtgtacggtcgtgaccccgagtgggtcacccagcgtttccccgacctgaccgctgctgaccgtgacggactgcgtgctcagtggcagcgttgcggttccaccgctgtggacgcttccggcgaccccttccgttccgactcctacggcctgctgggcaactccgtggacgctctgtacatccgcgagcgtctgcccaagctgcgttacgacaagcagctcgtgggtgtcaccgagcgcgagtcctacgtgaaggcttccgtgtcccccgaggctgcttgcgacatcaaggctgcttccgctgagcgttctggcgacagccgctcccaggctgctactcctgctgctggtgctcgtgtgccctccagctccccatccccacctgtcgagcctccctcccccgtgcaacctcctgctctgcctgcttccccctccgtgctgcctgctgagtccagcccctccctgtcaccctctgagcctgctgaggctgcctccatgtcccaccctctgagcgctgctgtgactgctgctaccgctccccctggtgctactgtggctggtgcttcccccgctgtgccttccctggcttggcctcacgacggtgtctacctgcccaaggacgctttcttctccctgctgggcgcttcccgttccgctgctcccgtgatgtaccccggtgctgtggctgctccccccagcgcttcacctgctcctctgcccctgccctcctaccccgcttcctacggtgctcccgtcgtgggttacgaccagctggctgctcgtcacttcgctgactacgtggacccccactaccccggctggggtcgtcgttacgagcccgctccttccctgcacccatcctaccctgtgccccctcctccatcacccgcttactaccgtcgtcgtgactcccccggtggcatggacgagcctccatctggatgggagcgttacgacggttcccaccgtggccagtcccaaaagcagcaccgtcacggtggttccggtggtcacaacaagcgtcgcaaggaagccgctgctgcatcctccagctccgacgaggacctgagcttccccggcgaggctgaacacggtcgtgctcgcaagcgtctgaagtcccacgtgaactccgacggaggtagcggaggccacgctggttccaaccagcagcagcaacagcgctacgacgagctgcgtgacgctatccacgagctgaagcgtgacctgttcgctgctcgccagtcctccaccctgctgtctgctgctctgccagctgccgcttcttcctcccctaccaccaccaccgtgtgcacccctactggcgagctgacctctggtggtggcgagactcccaccgctctgctgtccggtggtgctaaggtggccgagcgtgctcaggctggtgtcgtgaacgcttcctgccgtctggctaccgcttccggttccgaggctgccaccgctggtccctctaccgctggttcctcatcctgcccagcttccgtggtgctggctgccgctgctgctcaagccgccgctgcttcacagtcccccccaaaggatatggtggacctgaaccgtcgtatcttcgtggctgctctgaacaagctcgagtaataaaagcttgtcgagaagtactagaggatcataatcagccataccacatttgtagaggttttacttgctttaaaaaacctcccacacctccccctgaacctgaaacataaaatgaatgcaattgttgttgttaacttgtttattgcagcttataatggttacaaataaagcaatagcatcacaaatttcacaaataaagcatttttttcactgcattctagttgtggtttgtccaaactcatcaatgtatcttatcatgtctggatctgatcactgcttgagcctagaagatccggctgctaacaaagcccgaaaggaagctgagttggctgctgccaccgctgagcaataactatcataacccctaggggcctctaaacgggtcttgaggggttttttgctgaaaggaggaactatatccggatctgaacaggagggacagctgatagaaacagaagccactggagcacctcaaaaacaccatcatacactaaatcagtaagttggcagcatcacccgacgcactttgcgccgaataaatacctgtgacggaagatcacttcgcagaataaataaatcctggtgtccctgttgataccgggaagccctgggccaacttttggcgaaaatgagacgttgatcggcacgtaagaggttccaactttcaccataatgaaataagatcactaccgggcgtattttttgagttatcgagattttcaggagctaaggaagctaaaatggagaaaaaaatcactggatataccaccgttgatatatcccaatggcatcgtaaagaacattttgaggcatttcagtcagttgctcaatgtacctataaccagaccgttcagctggatattacggcctttttaaagaccgtaaagaaaaataagcacaagttttatccggcctttattcacattcttgcccgcctgatgaatgctcatccggaattccgtatggcaatgaaagacggtgagctggtgatatgggatagtgttcacccttgttacaccgttttccatgagcaaactgaaacgttttcatcgctctggagtgaataccacgacgatttccggcagtttctacacatatattcgcaagatgtggcgtgttacggtgaaaacctggcctatttccctaaagggtttattgagaatatgtttttcgtctcagccaatccctgggtgagtttcaccagttttgatttaaacgtggccaatatggacaacttcttcgcccccgttttcaccatgggcaaatattatacgcaaggcgacaaggtgctgatgccgctggcgattcaggttcatcatgccgtttgtgatggcttccatgtcggcagaatgcttaatgaattacaacagtactgcgatgagtggcagggcggggcgtaatttttttaaggcagttattggtgcccttaaacgcctggttgctacgcctgaataagtgataataagcggatgaatggcagaaattcgaaagcaaattcgacccggtcgtcggttcagggcagggtcgttaaatagccgcttatgtctattgctggtttaccggtttattgactaccggaagcagtgtgaccgtgtgcttctcaaatgcctgaggccagtttgctcaggctctccccgtggaggtaataattgacgatatgatcatttattctgcctcccagctgacattcatccggggtcagcaccgtttctgcggactggctttctacgtgttccgcttcctttagcagcccttgcgccctgagtgcttgcggcagcgtgaagctaattctgtcagccgttaagtgttcctgtgtcactcaaaattgctttgagaggctctaagggcttctcagtgcgttacatccctggcttgttgtccacaaccgttaaaccttaaaagctttaaaagccttatatattcttttttttcttataaaacttaaaaccttagaggctatttaagttgctgatttatattaattttattgttcaaacatgagagcttagtacgtgaaacatgagagcttagtacgttagccatgagagcttagtacgttagccatgagggtttagttcgttaaacatgagagcttagtacgttaaacatgagagcttagtacgtgaaacatgagagcttagtacgtactatcaacaggttgaactgctgatcaacagatcctctacgcggccgcggtaccataacttcgtatagcatacattatacgaagttatctggtttaaacgtacccgtagtggctatggcagggcttgccgccccgacgttggctgcgagccctgggccttcacccgaacttgggggttggggtggggaaaaggaagaaacgcgggcgtattggtcccaatggggtctcggtggggtatcgacagagtgccagccctgggaccgaaccccgcgtttatgaacaaacgacccaacacccgtgcgttttattctgtctttttattgccgtcatagcgcgggttccttccggtattgtctccttccgtgtttcagttagcctcccccatctcccggtaccgcatgctatgcatcagctgctagcttagcgagcgtccacagcctggggaccgtaacgggagtgagcgggcaggttcacacgggtctgcttcagctcagggggcaggccagcgtagtacttgtccaggtgacgcagcaggggggggtccagctggtgacgcaggcagaattccttcacagcgttgtacaggccgtagaacagggtgataccctcgggagcagcagcggtggacacgggcagacgcacagcacggttggtacgggtagcctcgttacggatagccaccaccacgttgaacagggaggggggcaccagctcgaaacccagcacgtgttcggtgaagatggaacgaccgtaggacagacgagtcaggtcgtaaccacggcacaggtcgtccacgcaagtgtacacagcgggggaaccgtcgccgcactcggagtaaccgcgcatcacggtcatccaacggggagcggtgtcggaggacagcagggtcagcagagcacgcagctggtcggggttgttgtacagcagggccagggtgtccaggaaagcgtcgtccagcagcacggagttagcagcctcgggggtcacgggacggtaacggatcagctgggacaggggaccgtccctacgggtcacgttgaccaggggacgcagccaggactcgtacttgtcgccctggaacacctctcccagcaggcaacgacgggtcagctcggggcactcagcgggcaccttctcagccacggtgggagccacggacacggtagcggaggacacgatgggcagcagcaggcagcaccacagcagagccacgggaccgggggagaaggagaaaccgcagtcgggacgacggcacatggtggctcgagatcccgggtgatcaagtcttcgtcgagtgattgtaaataaaatgtaatttacagtatagtattttaattaatatacaaatgatttgataataattcttatttaactataatatattgtgttgggttgaattaaaggtccgtatactagtatcgattcgcgacctactccggaatattaatagatcatggagataattaaaatgataaccatctcgcaaataaataagtattttactgttttcgtaacagttttgtaataaaaaaacctataaatattccggattattcataccgtcccaccatcgggcgcggatccgccaccatgaactccaaggacctgacccccttcctgaccaccctgtggctgctgctggaccactcccgtgtgcctcgtgtgcgtgctgaggaatgctgcgaagtgatcaacgtgaaccacccccccgagcgctgctacgacttcaagatgtgcaacctgttcaccgtggctctgcgttgccccgacggcgaagtgtgctactcccccgaaaagaccgctgagatccgtggtatcgtgaccaccatgacccactccctgacccgtcaagtgatccacaacaagctgaccagctgcaactacaaccccctgtacctcgaggctgacggtcgtatccgttgcggcaaggtgtccgacaaggctcagtacctgctgggtgctgctggttccgtgccctaccgttggatcaacctcgagtacgacaagatcacccgtatcgtgggcctggaccagtacctcgagtccgtgaagaagcacaagcgtctggacgtgtgccgtgctaagatgggttacatgctgcagtaaaagcttgtcgagaagtactagaggatcataatcagccataccacatttgtagaggttttacttgctttaaaaaacctcccacacctccccctgaacctgaaacataaaatgaatgcaattgttgttgttaacttgtttattgcagcttataatggttacaaataaagcaatagcatcacaaatttcacaaataaagcatttttttcactgcattctagttgtggtttgtccaaactcatcaatgtatcttatcatgtctggattgatcactgcttgagcctagaagatccggctgctaacaaagcccgaaaggaagctgagttggctgctgtggctagctttgtttaactttaagaaggagatacatctagaccggaatattaatagatcatggagataattaaaatgataaccatctcgcaaataaataagtattttactgttttcgtaacagttttgtaataaaaaaacctataaatattccggattattcataccgtcccaccatcgggcgcggatccgccaccatgctgcgtctgctgctgcgtcaccacttccactgcctgctgctgtgcgctgtgtgggctaccccctgcctggcttccccttggtccaccctgaccgctaaccagaacccctccccaccctggtccaagctgacctactccaagccccacgacgctgctaccttctactgccccttcctgtacccatccccccctcgttccccactgcagttctccggtttccagcgtgtgctgaccggtcccgagtgccgtaacgagactctgtacctgctgtacaaccgcgagggccagaccctggtcgagaggtcctccacctgggtcaagaaggtcatctggtacttgtccggtcgtaaccagaccatcctgcagcgtatgccccgtaccgcttccaagccctccgacggcaacgtgcagatctccgtcgaggacgctaagatcttcggtgctcacatggtgcccaagcagaccaagctgctgcgtttcgtggtcaacgacggcacccgttaccagatgtgcgtgatgaagctcgagtcctgggctcacgtgttccgtgactactccgtgtccttccaagtgcgcctgaccttcaccgaggctaacaaccagacctacaccttctgcacccaccccaacctgatcgtgtaaaagcttgtcgagaagtactagaggatcataatcagccataccacatttgtagaggttttacttgctttaaaaaacctcccacacctccccctgaacctgaaacataaaatgaatgcaattgttgttgttaacttgtttattgcagcttataatggttacaaataaagcaatagcatcacaaatttcacaaataaagcatttttttcactgcattctagttgtggtttgtccaaactcatcaatgtatcttatcatgtctggatctgatcactgcttgagcctagaagatccggctgctaacaaagcccgaaaggaagctgagttggctgctgggtgcctaatgagtgagctaactcacattaattgcccggaatattaatagatcatggagataattaaaatgataaccatctcgcaaataaataagtattttactgttttcgtaacagttttgtaataaaaaaacctataaatattccggattattcataccgtcccaccatcgggcgcggatccgccaccatgctgcgtctgctgctgcgtcaccacttccactgcctgctgctgtgcgctgtgtgggctaccccctgcctggcttccccctggttcaccctgaccgctaaccagaacccctccccaccctggtccaagctgacctaccccaagccccacgacgctgctaccttctactgccccttcctgtacccatccccacctcgttccccatcccagttctccggtttccagcgtgtgtccaccggtcccgagtgccgtaacgagactctgtacctgctgtacaaccgcgagggccagaccctggtcgagaggtcctccacctgggtcaagaaggtcatctggtacttgtccggtcgtaaccagaccatcctgcagcgtatgccccgtaccgcttccaagccctccgacggcaacgtgcagatctccgtcgaggacgctaagatcttcggtgctcacatggtgcccaagcagaccaagctgctgcgtttcgtggtcaacgacggcacccgttaccagatgtgcgtgatgaagctggaatcctgggctcacgtgttccgtgactactccgtgtccttccaagtgcgcctgaccttcaccgaggctaacaaccagacctacaccttctgcacccaccccaacctgatcgtgtaagtcgacaagcttgtcgagaagtactagaggatcataatcagccataccacatttgtagaggttttacttgctttaaaaaacctcccacacctccccctgaacctgaaacataaaatgaatgcaattgttgttgttaacttgtttattgcagcttataatggttacaaataaagcaatagcatcacaaatttcacaaataaagcatttttttcactgcattctagttgtggtttgtccaaactcatcaatgtatcttatcatgtctggatctgatcactgcttgagcctagaagatccggctgctaacaaagcccgaaaggaagctgagttggctgctgggtgcctaatgagtgagctaactcacattaattgcccggaatattaatagatcatggagataattaaaatgataaccatctcgcaaataaataagtattttactgttttcgtaacagttttgtaataaaaaaacctataaatattccggattattcataccgtcccaccatcgggcgcggatccgccaccggatccgccaccatgcgtctgtgccgtgtgtggctgtccgtgtgcctgtgcgctgtggtgctgggacagtgccagcgtgaaaccgctgagaagaacgactactaccgtgtgccccactactgggacgcttgctcccgtgctctgcccgaccagacccgttacaagtacgtcgagcagctggtggacctgaccctgaactaccactacgacgcttcccacggcctggacaacttcgacgtgctgaagcgtatcaacgtgaccgaggtgtccctgctgatctccgacttccgtcgtcagaaccgtcgtggtggcaccaacaagcgtaccaccttcaacgctgctggttccctggctccccacgctcgttccttggagttctccgtgcgtctgttcgccaactaataaaagcttgtcgagaagtactagaggatcataatcagccataccacatttgtagaggttttacttgctttaaaaaacctcccacacctccccctgaacctgaaacataaaatgaatgcaattgttgttgttaacttgtttattgcagcttataatggttacaaataaagcaatagcatcacaaatttcacaaataaagcatttttttcactgcattctagttgtggtttgtccaaactcatcaatgtatcttatcatgtctggatctgatcactgcttgagcctagaagatccggctgctaacaaagcccgaaaggaagctgagttggctgctgccaccgctgagcaataactatcataacccccggaatattaatagatcatggagataattaaaatgataaccatctcgcaaataaataagtattttactgttttcgtaacagttttgtaataaaaaaacctataaatattccggattattcataccgtcccaccatcgggcgcggatcccggtccgaagcgcgcggaattcaaaggcctaccgtcgacgccaccatggaatcccgtatctggtgcctggtcgtgtgcgtgaacctgtgcatcgtgtgcctgggtgctgctgtgtcctcctcctccacccgtggcacctccgctacccactcccaccactcctcccacaccacctccgccgctcactcccgttccggttccgtgtcccagcgtgtgacctcctcccagaccgtgtcccacggtgtcaacgagactatctacaacaccaccctgaagtacggcgacgtcgtgggtgtcaacaccaccaagtacccctaccgtgtgtgctccatggctcagggcaccgacctgatccgtttcgagcgtaacatcgtgtgcacctccatgaagcccatcaacgaggacctggacgagggtatcatggtggtgtacaagcgcaacatcgtggctcacaccttcaaggtccgcgtgtaccagaaggtgctgaccttccgtcgttcctacgcttacatccacaccacttacctgctgggttccaacaccgagtacgtggcccctcccatgtgggagatccaccacatcaactcccactcccagtgctactcctcttactcccgtgtgatcgctggcaccgtgttcgtggcttaccaccgtgactcctacgagaacaagaccatgcagctgatgcccgacgactactccaacacccactccacccgttacgtgaccgtgaaggaccagtggcactcccgtggttccacctggctgtaccgtgaaacctgcaacctgaactgcatggtcaccatcaccaccgctcgttccaagtacccttaccacttcttcgctacctccaccggcgacgtggtggacatctcccccttctacaacggtactaaccgtaacgcttcctacttcggcgagaacgctgacaagttcttcatcttccccaactacaccatcgtgtccgacttcggtcgtcccaactccgctctggaaacccaccgtctggtggctttcttggagcgtgctgactccgtgatctcctgggacatccaggacgagaagaacgtgacctgccagctgaccttctgggaggcttccgagcgtaccatccgttccgaggctgaggactcctaccacttctccagcgctaagatgaccgctaccttcctgtccaagaaacaagaggtcaacatgtccgactccgccctggactgcgtgcgtgacgaggctatcaacaagctgcagcagatcttcaacacctcctacaaccagacctacgagaagtacggaaacgtgtccgtgttcgagactaccggtggcctggtggtgttctggcagggtatcaagcagaagtccctggtcgagctggaacgtctggctaaccgttcctccctgaacctgacccacaaccgtaccaagcgttccaccgacggcaacaacgctactcacctgtccaacatggaatccgtgcacaacctggtgtacgctcagctgcagttcacctacgacaccctgcgcggttacatcaaccgtgctctggctcagatcgctgaggcttggtgcgtggaccagcgtcgtaccctggaagtgttcaaggaactgtccaagatcaacccctccgctatcctgtccgccatctacaacaagcctatcgctgctcgtttcatgggcgacgtgctgggcctggcttcctgcgtgaccatcaaccagacttccgtgaaggtgctgcgtgacatgaacgtgaaggaatcccccggtcgttgctactcccgtcccgtggtcatcttcaacttcgctaactcctcctacgtgcagtacggccagctgggcgaggacaacgagatcctgctgggcaaccaccgtaccgaggaatgccagctgccctccctgaagatcttcatcgctggcaactccgcttacgaatacgtggactacctgttcaagcgcatgatcgacctgtcctccatctctaccgtggactccatgatcgctctggacatcgaccccctggaaaacaccgacttccgtgtgctggaactgtactcccagaaggaactgcgttccatcaacgtgttcgacctggaagagatcatgcgcgagttcaactcctacaagcagcgtgttaagtacgtcgaggacaaggtggtggaccccctgcccccctacctgaagggactggacgacctgatgtccggcctgggagctgccggcaaggctgtgggtgtcgctatcggtgctgtgggtggtgctgtggcttccgtggtcgagggtgtcgccaccttcctgaagaaccccttcggtgctttcaccatcatcctggtggctatcgctgtggtcatcatcatctacctgatctacacccgtcagcgtcgtctgtgcatgcagcccctgcagaacctgttcccctacctggtgtccgctgacggtactaccgtgacctccggcaacaccaaggacacctccctgcaggctcccccatcctacgaggaatccgtctacaactccggtcgcaagggtcccggtcccccttcctccgacgcttctaccgctgctcccccatacaccaacgagcaggcttaccagatgctgctggctctcgtgcgtctggacgctgagcagcgtgcacagcagaacggcaccgactccctggacggccagaccggaacccaggacaagggccagaagcccaacctgctggaccgtctgcgtcaccgcaagaacggttaccgtcacctgaaggactccgacgaggaagagaacgtctaaggcgcgccaagcttgtcgagaagtactagagatcataatcagccataccacatttgtagaggttttacttgctttaaaaaacctcccacacctccccctgaacctgaaacataaaatgaatgcaattgttgttgttaacttgtttattgcagcttataatggttacaaataaagcaatagcatcacaaatttcacaaataaagcatttttttcactgcattctagttgtggtttgtccaaactcatcaatgtatcttatcatgtctggatctgatcactgcttgagcctagaagatccggctgctaacaaagcccgaaaggaagctgggaatattaatagatcatggagataattaaaatgataaccatctcgcaaataaataagtattttactgttttcgtaacagttttgtaataaaaaaacctataaatattccggattattcataccgtcccaccatcgggcgcggatccgccaccatgcgtcccggcctgccctcctacctgatcgtgctggctgtgtgcctgctgtcccacctcctgtcctcccgttacggtgctgaggctatctccgagcccctggacaaggctttccacctcctgctgaacacctacggtcgtcctatccgtttcctgcgcgagaacaccacccagtgcacctacaactcctccctgcgcaactccaccgtcgtccgcgagaacgctatctccttcaacttcttccagtcctacaaccagtactacgtgttccacatgccccgttgcctgttcgctggtcccctggctgagcagttcctgaaccaggtggacctgaccgagactctcgagcgttaccagcagcgtctgaacacttacgctctggtgtccaaggacctggcttcctaccgttccttcagccagcagctgaaggctcaggactccctgggcgagcagcccaccactgtgcctccccctatcgacctgtccatcccccacgtgtggatgcccccccagaccactcctcacggctggaccgagtcccacaccacctccggactgcaccgtccccacttcaaccagacctgcatcctgttcgacggtcacgacctgctgttctccaccgtgaccccctgcctgcaccagggcttctacctcatcgacgagctgcgttacgtgaagatcaccctgaccgaggatttcttcgtggtcaccgtgtccatcgacgacgacacccccatgctgctgatcttcggtcacctcccccgtgtgctgttcaaggctccctaccagcgtgacaacttcatcctgcgtcagaccgagaagcacgagctgctggtgctggtcaagaaggaccagctgaaccgtcactcttacctgaaggaccccgacttcctggacgctgctctggacttcaactacctggacctgtccgctctgctgaggaactccttccaccgttacgctgtggacgtgctgaagtccggtcgttgccagatgctggaccgtcgtaccgtcgagatggctttcgcttacgccctggctctgttcgctgctgctcgtcaagaagaggctggcgctcaggtgtccgtgccccgtgctctggaccgtcaggctgctctgctgcagatccaagagttcatgatcacttgcctgtcccagaccccccctcgtaccaccctgctgctgtaccccaccgctgtggacctggctaagcgtgctctgtggacccccaaccagatcaccgacatcacctccctcgtgcgtctggtgtacatcctgtccaagcagaaccagcagcacctgatcccccagtgggctctgcgtcagatcgctgacttcgctctgaagctgcacaagacccacctggcttcattcctcagcgctttcgctcgccaagagctgtacctgatgggttccctggtgcactccatgctggtgcacaccaccgagcgtcgcgagatcttcatcgtggaaaccggcctgtgctccctggccgagctgtcccacttcacccagctgctggctcacccccaccacgagtacctgtccgacctgtacaccccctgctcctcttccggtcgtcgtgaccactccctggaacgtctgacccgtctgttccccgacgctaccgtgcctaccaccgtgcctgctgctctgtccatcctgtctaccatgcagccctccaccctggaaaccttccccgacctgttctgcctgcctctgggcgagtccttctccgctctgaccgtgtccgagcacgtgtcctacgtggtcaccaaccagtacctgatcaagggcatctcctaccccgtgtccaccaccgtcgtgggccagtccctgatcatcacccagaccgactcccagaccaagtgcgagctgacccgtaacatgcacaccactcactccatcaccgctgctctgaacatctccctcgagaactgcgctttctgccagtccgctctgttggagtacgacgacactcagggtgtcatcaacatcatgtacatgcacgactccgacgacgtgctgttcgctctggacccctacaacgaggtggtggtgtcctccccccgtacccactacctgatgctgctgaagaacggcaccgtgctggaagtgaccgacgtggtggtggacgctaccgaccgtctgctgatgatgtccgtgtacgctctgtccgctatcatcggcatctacctgctgtaccgtatgctgaagacctgctaaggcgccaagctttgtcgagaagtactagaggatcataatcagccataccacatttgtagaggttttacttgctttaaaaaacctcccacacctccccctgaacctgaaacataaaatgaatgcaattgttgttgttaacttgtttattgcagcttataatggttacaaataaagcaatagcatcacaaatttcacaaataaagcatttttttcactgcattctagttgtggtttgtccaaactcatcaatgtatcttatcatgtctggatctgatcactgcttgagcctagaagatccggctgctaacaaagcccgaaaggaagctgagttggctgctgccaccgctgagcaataactatcataacccctaggagatccgaaccagataagtgaaatctagttccaaactattttgtcatttttaattttcgtattagcttacgacgctacacccagttcccatctattttgtcactcttccctaaataatccttaaaaactccatttccacccctcccagttcccaactattttgtccgcccaca

SEQ ID NO: 56 - DNA, 27327 bp, Artificial Sequence
  Synthetic construct
ttgttccagtttggaacaagagtccactattaaagaacgtggactccaacgtcaaagggcgaaaaaccgtctatcagggcgatggcccactacgtgaaccatcaccctaatcaagttttttggggtcgaggtgccgtaaagcactaaatcggaaccctaaagggagcccccgatttagagcttgacggggaaagccggcgaacgtggcgagaaaggaagggaagaaagcgaaaggagcgggcgctagggcgctggcaagtgtagcggtcacgctgcgcgtaaccaccacacccgccgcgcttaatgcgccgctacagggcgcgtccattcgccattcaggctgcgcaactgttgggaagggcgatcggtgcgggcctcttcgctattacgccagctggcgaaagggggatgtgctgcaaggcgattaagttgggtaacgccagggttttcccagtcacgacgttgtaaaacgacggccagtgcatagaccagccgcgtaacctggcaaaatcggttacggttgagtaataaatggatgccctgcgtaagcgggtgtgggcggacaataaagtcttaaactgaacaaaatagatctaaactatgacaataaagtcttaaactagacagaatagttgtaaactgaaatcagtccagttatgctgtgaaaaagcatactggacttttgttatggctaaagcaaactcttcattttctgaagtgcaaattgcccgtcgtattaaagaggggcgtggccaagggcatggtaaagactatattcgcggcgttgtgacaatttaccgaacaactccgcggccgggaagccgatctcggcttgaacgaattgttaggtggcggtacttgggtcgatatcaaagtgcatcacttcttcccgtatgcccaactttgtatagagagccactgcgggatcgtcaccgtaatctgcttgcacgtagatcacataagcaccaagcgcgttggcctcatgcttgaggagattgatgagcgcggtggcaatgccctgcctccggtgctcgccggagactgcgagatcatagatatagatctcactacgcggctgctcaaacttgggcagaacgtaagccgcgagagcgccaacaaccgcttcttggtcgaaggcagcaagcgcgatgaatgtcttactacggagcaagttcccgaggtaatcggagtccggctgatgttgggagtaggtggctacgtctccgaactcacgaccgaaaagatcaagagcagcccgcatggatttgacttggtcagggccgagcctacatgtgcgaatgatgcccatacttgagccacctaactttgttttagggcgactgccctgctgcgtaacatcgttgctgctgcgtaacatcgttgctgctccataacatcaaacatcgacccacggcgtaacgcgcttgctgcttggatgcccgaggcatagactgtacaaaaaaacagtcataacaagccatgaaaaccgccactgcgccgttaccaccgctgcgttcggtcaaggttctggaccagttgcgtgagcgcatacgctacttgcattacagtttacgaaccgaacaggcttatgtcaactgggtttgtgccttcatccgtttccacggtgtgcgtcacccggcaaccttgggcagcagcgaagtcgaggcatttctgtcctggctggcgaacgagcgcaaggtttcggtctccacgcatcgtcaggcattggcggccttgctgttcttctacggcaaggtgctgtgcacggatctgcccttgcttcaggagatcggtagacctcggccgtcgcggcgcttgccggtggtgctgaccccggatgaagtggttcgcatcctcggttttctggaaggcgagcatcgtttgttcgcccaggactctagctatagttctagtggttggctacagctttgtttgtactatcaacaggttgaactgctgatcaacagatcctctacgcggccgcggtaccataacttcgtatagcatacattatacgaagttatctggtttaaacgtacccgtagtggctatggcagggcttgccgccccgacgttggctgcgagccctgggccttcacccgaacttgggggttggggtggggaaaaggaagaaacgcgggcgtattggtcccaatggggtctcggtggggtatcgacagagtgccagccctgggaccgaaccccgcgtttatgaacaaacgacccaacacccgtgcgttttattctgtctttttattgccgtcatagcgcgggttccttccggtattgtctccttccgtgtttcagttagcctcccccatctcccggtaccgcatgctatgcatcagctgctagcaccatggctcgagatcccgggtgatcaagtcttcgtcgagtgattgtaaataaaatgtaatttacagtatagtattttaattaatatacaaatgatttgataataattcttatttaactataatatattgtgttgggttgaattaaaggtccgtatactagtatcgattcgcgacctactccggaatattaatagatcatggagataattaaaatgataaccatctcgcaaataaataagtattttactgttttcgtaacagttttgtaataaaaaaacctataaatattccggattattcataccgtcccaccatcgggcgcggatccgccaccatggaaaactggtccgctctggaactgctgcccaaggtcggaatccctaccgacttcctgacccacgtcaagacctccgctggcgaggaaatgttcgaggctctgaggatctactacggcgacgaccccgagcgttacaacatccacttcgaggctatcttcggcaccttctgcaaccgtctggaatgggtgtacttcctgacttccggcctggctgctgctgctcacgctatcaagttccacgacctgaacaagctgaccaccggcaagatgctgttccacgtgcaagtgccccgtgtggcttccggtgctggcctgcctacctcccgtcagaccaccatcatggtcaccaagtactccgagaagtcccccatcaccatccctttcgagctgtccgctgcttgcctgacttacctgcgtgaaaccttcgagggcaccatcctggacaagatcctgaacgtcgaggctatgcacaccgtgctgcgtgctctgaagaacaccgctgacgctatggaacgtggcctgatccacagcttcctccagaccctgctgaggaaggctcccccctacttcgtggtgcagaccctggtcgagaacgctaccctggctcgtcaggctctgaaccgtatccagcgctccaacatcctgcagtccttcaaggctaagatgctggctaccctgttcctgctgaaccgtacccgtgaccgtgactacgtgctgaagttcctgacccgtctggctgaggctgctaccgactccatcctcgacaaccctactacctacaccacctcctccggtgctaagatctccggtgtcatggtgtccaccgctaacgtgatgcagatcatcatgtccctgctgtcctcccacatcactaaggaaaccgtgtccgctcccgctacctacggcaacttcgtgctgtcccccgagaacgctgtgaccgctatctcctaccactctatcctggctgacttcaactcctacaaggctcacctgacctccggccagccccacctccccaacgactccctgagccaggctggtgctcactccctgacccccctgtccatggacgtgatccgtctgggcgaaaagaccgtgatcatggaaaacctgcgtcgcgtgtacaagaacaccgacaccaaggaccccctggaacgtaacgtggacctgaccttcttcttccccgtgggcctgtacctgcccgaggaccgtggttacaccaccgtcgagtccaaggtcaagctgaacgacaccgtgcgtaacgctctgcccaccaccgcttacctgctgaacagggaccgtgctgtgcaaaagatcgacttcgtggacgctctcaagaccctgtgccaccccgtgctgcacgagcctgctccatgcctgcaggctttcaccgagcgtggtcccccatccgagcccgctatgcagcgtctgctggaatgccgtttccagcaagagcccatgggtggtgctgctcgtcgtatcccccacttctaccgtgtgcgccgcgaggtgccccgtaccgtgaacgagatgaagcaggacttcgtggtcaccgacttctacaaggttggaaacatcaccctgtacaccgagctgcaccctttcttcgacttcacccactgccaagagaactccgagactgtggctctgtgcaccccccgtatcgtgatcggcaacctgcccgacggcctggctcccggtcccttccacgagctgaggacctgggagatcatggaacacatgcgcctgcgtcccccacccgactacgaggaaaccctgcgtctgttcaagaccaccgtgacctcccccaactaccccgagctgtgctacctggtggacgtgctggtgcacggcaacgctgacgctttcctgctgatccgcgctttcatcgctcgttgcatcgtgaacatgttccacacccgtcagctgctggtgttcgctcactcctacgctctggtcaccctgatcgctgagcacctggctgacggtgctctgcccccccagctcctgttccactaccgtaacctggtggctgtgctgcgcctggtcacccgtatctccgctctgcccggcctgaacaacggccagctggctgaggaacccctgtccgcttacgtgaacgctctgcacgaccacaggctgtggccccccttcgtgacccacctccctcgtaacatggaaggtgtccaggtggtggctgatcgtcagcccctgaaccccgctaacatcgaggctcgtcaccacggtgtctccgacgtgccccgtctgggtgctatggacgctgacgagcccctgttcgtggacgactaccgtgctaccgacgacgagtggaccctgcaaaaggtgttctacctgtgcctgatccccgctatgaccaacaaccgtgcttgcggcctgggcctgaacctcaagactctgctggtggacctgttctaccgtcccgccttcctgctcatgcccgctgctaccgctgtgtccacctccggcaccacctccaaggaatccacctctggtgtcacccccgaggactccgtggctgctcagcgtcaggctgtgggcgagatgctgaccgagctggtcgaggacgtggccaccgacgctcacacccctctgctgcaggcttgccgcgagctgttcctggctgtgcagttcgtgggcgagcacgtgaaggtgctggaagtgcgtgctcccctggaccacgctcagaggcagggactgcccgacttcatctcccgtcagcatgtgctgtacaacggttgctgcgtcgtgaccgctcctaagaccctgatcgagtactccctgcccgtgcccttccaccgtttctactccaaccccaccatctgcgctgctctgtccgacgacatcaagcgttacgtgaccgagttcccccactaccatagacacgatggtggtttccccctgcccaccgctttcgctcacgagtaccacaactggctgcgtagccccttctcccgttactccgctacctgccccaacgtgctgcactccgtgatgaccctggctgctatgctgtacaagatctcccccgtgtccctggtgctgcagaccaaggctcacatccaccccggtttcgctctgaccgctgtgcgtaccgacaccttcgaggtggacatgctgctgtactccggcaagtcctgcacctccgtcatcatcaacaaccccatcgtgaccaaggaagagagggacatctccaccacctaccacgtgacccagaacatcaacaccgtggacatgggcctgggttacacctccaacacttgcgtggcctacgtgaaccgcgtccgcaccgacatgggtgtccgtgtgcaggacctgttccgtgtgttccccatgaacgtgtaccgccacgatgaggtggaccgttggatcaggcacgctgctggcgtcgagcgtccccagctgctggacaccgagactatctccatgctgaccttcggttccatgtccgagcgcaacgctgctgctaccgtgcacggccagaaggctgtctgcgagctgatcctgacccctgtgactatggacgtgaactacttcaagatcaccaacaaccctcgtggtcgtgcttcctgcatgctgggcgtggacccctacgacaccgaggctgccaccaaggctatctacgaccaccgcgaggctgacgctcagaccttcgctgctacccacaacccatgggcttcccaggctggttgcctgtccgacgtcctgtacaacacccgtcaccgcgagcgtctgggctacaactccaagttctactccccctgcgctcagtacttcaacaccgaggaaatcatcgctgccaacaagaccctcttcaagaccatcgacgagtacctgctgcgcgctaaggactgcatccgtggcgacaccgacactcagtacgtgtgcgtcgagggaaccgagcagctgatcgagaacccttgccgtctgacccaagaggctctgcccatcctgtccaccaccaccctggctctgatggaaactaagctgaagggtggcgctggtgctttcgctacctccgagactcacttcggcaactacgtcgtgggagagatcatccccctgcagcagtccatgctgttcaacagctaagagctcaagcttgtcgagaagtactagaggatcataatcagccataccacatttgtagaggttttacttgctttaaaaaacctcccacacctccccctgaacctgaaacataaaatgaatgcaattgttgttgttaacttgtttattgcagcttataatggttacaaataaagcaatagcatcacaaatttcacaaataaagcatttttttcactgcattctagttgtggtttgtccaaactcatcaatgtatcttatcatgtctggatctgatcactgcttgagcctagaagatccggctgctaacaaagcccgaaaggaagctgagttggctgctgcccaccgctgagcaataactatcataacccccggaatattaatagatcatggagataattaaaatgataaccatctcgcaaataaataagtattttactgttttcgtaacagttttgtaataaaaaaacctataaatattccggattattcataccgtcccaccatcgggcgcggatccgccaccatggctgctatggaagctaacatcttctgcaccttcgaccacaagctgtctatcgctgacgtgggcaagctgaccaagctggtggctgctgtggtgcccatcccccagcgtctgcacctgatcaagcactaccagctgggcctgcaccagttcgtggaccacacccgtggttacgtgcgtctgcgtggcctgctgcgtaacatgaccctgaccctgatgcgtcgtgtcgagggcaaccagatcctgctgcacgtgcccacccacggcctgctgtacaccgtgctgaacaccggtcccgtgacctgggagaagggcgacgctctgtgcgtgctgccccccctgttccacggtcccctggctcgtgaaaacctgttgaccctgggccagtgggagctggtgctgccctggatcgtgcccatgcccctggctctggaaatcaaccagcgcctgctgatcatgggcctgttctccctggaccgttcctacgaagaagtgaaggctgctgtccagcagctgcagaccatcaccttccgtgacgctaccttcaccatccccgaccccgtgatcgaccagcacctcctgatcgacatgaagaccgcttgcctgtccatgtccatggtggctaacctggcttccgagctgaccatgacctacgtccgcaagctggctttggaggactcttccatgctgctggtcaagtgccaagagctgctgatgcgtctggaccgcgagcgttccgtgggcgagcctcgtactcccgctcgtcctcagcacgtgtcccccgacgacgagatcgctcgtctgtccgctctgttcgtgatgctgcgtcagctggacgacctgatccgcgagcaggtcgtgttcaccgtgtgcgacgtgagcccagacaacaagtccgctacctgcatcttcaagggctaaggcgcgccaagcttgtcgagaagtactagaggatcataatcagccataccacatttgtagaggttttacttgctttaaaaaacctcccacacctccccctgaacctgaaacataaaatgaatgcaattgttgttgttaacttgtttattgcagcttataatggttacaaataaagcaatagcatcacaaatttcacaaataaagcatttttttcactgcattctagttgtggtttgtccaaactcatcaatgtatcttatcatgtctggatctgatcactgcttgagcctagaagatccggctgctaacaaagcccgaaaggaagctgagttggctgctgccaccgctgagcaataactatcataacccccggaatattaatagatcatggagataattaaaatgataaccatctcgcaaataaataagtattttactgttttcgtaacagttttgtaataaaaaaacctataaatattccggattattcataccgtcccaccatcgggcgcggatcccggtccgaagcgcgcggaattcaaaggcctgccaccatggaaatgaacaaggtgctgcatcaggatctggtgcaggctacccgtcgtatcctgaagctgggcccctccgagctgcgtgtgaccgacgctggcctgatctgcaagaaccccaactactccgtgtgcgacgctatgctcaagaccgacaccgtgtactgcgtcgagtacctgctgtcctactgggagtcccgtaccgaccacgtgccctgcttcatcttcaagaacaccggttgcgctgtgtccctgtgctgcttcgtgcgtgctcccgtgaagctggtgtcccctgctcgtcacgtgggcgagttcaacgtgctgaaggtcaacgagtccctgatcgtgaccctgaaggacatcgaggaaatcaagccctccgcttacggtgtcctgactaagtgcgtcgtccgcaagtccaactccgcttccgtgttcaacatcgagctgatcgctttcggtcccgagaacgagggcgagtacgagaacctgctgcgcgagctgtacgctaagaaggctgcttccacctccctggctgtgcgtaaccacgtgaccgtgtcctcccactccggttccggtccctccctgtggcgtgctcgtatgtccgctgctctgacccgtaccgctggcaagcgctcctccaggactgctagccctccaccaccacctcctcgtcaccctagctgctctcccactatggtggctgctggtggagctgctgctggtcctagacctccccctcctcctatggctgctggatcctggcgtctgtgccgttgcgaggcttgcatgggccgttgcggttgcgcttccgagggcgacgctgacgaggaagaggaagagttgctggctctggctggcgagggcaaggctgctgctgccgctgccggtcaagacgtcggtggttccgctcgtcgtcccctcgaggaacacgtgtcccgtcgtcgtggtgtctccacccaccaccgtcaccccccttccccaccttgcgctccctccctggaacgtaccggttaccgttgggctccttcctcctggtggcgcgctcgttctggtccttcccgtccccagtccggtccctggctgcctgctcgtttcgctaccctgggtcccctggtcctggctctgctgttggtgctggccctgctgtggcgtggtcacggtcaatcccccagccccacccgttccgctcaccgtgactaaaagcttgtcgagaagtactagaggatcataatcagccataccacatttgtagaggttttacttgctttaaaaaacctcccacacctccccctgaacctgaaacataaaatgaatgcaattgttgttgttaacttgtttattgcagcttataatggttacaaataaagcaatagcatcacaaatttcacaaataaagcatttttttcactgcattctagttgtggtttgtccaaactcatcaatgtatcttatcatgtctggatctgatcactgcttgagcctagaagatccggctgctaacaaagcccgaaaggaagctgagttggctgctgtggctagctttgtttaactttaagaaggagatacatctagaaatattaatagatcatggagataattaaaatgataaccatctcgcaaataaataagtattttactgttttcgtaacagttttgtaataaaaaaacctataaatattccggattattcataccgtcccaccatcgggcgcggatcccggtccgaagcgcgcggaattcaaaggcctacgtcgacgccaccatgtccaacaccgctcccggtcccaccgtggctaacaagcgtgacgagaagcaccgtcacgtggtcaacgtggtgctcgagctgcccaccgagatctccgaggctacccaccccgtgctggctaccatgctgtccaagtacacccgtatgtcctccctgttcaacgacaagtgcgctttcaagctggacctgctgcgtatggtggctgtgtcccgtacccgtcgctaaaagcttgtcgagaagtactagaggatcataatcagccataccacatttgtagaggttttacttgctttaaaaaacctcccacacctccccctgaacctgaaacataaaatgaatgcaattgttgttgttaacttgtttattgcagcttataatggttacaaataaagcaatagcatcacaaatttcacaaataaagcatttttttcactgcattctagttgtggtttgtccaaactcatcaatgtatcttatcatgtctggatctgatcactgcttgagcctagaagatccggctgctaacaaagcccgaaaggaagctgagttggctgctgggtgcctaatgagtgagctaactcacattaattgcccggaatattaatagatcatggagataattaaaatgataaccatctcgcaaataaataagtattttactgttttcgtaacagttttgtaataaaaaaacctataaatattccggattattcataccgtcccaccatcgggcgcggatcccggtccgaagcgcgcggaattcgccaccatggacgctcgtgctgtggctaagcgtccccgtgaccccgctgacgaggacaacgagctggtcaccgctctgaaggctaagcgtgaagtgaacaccatctccgtgcgttacctgtaccacgctgaccaccaggctctgaccgctcgtttcttcgtgcccgagggcctggtcgagttcgaggctcagcccggtgctctgctgatccgtatggaaaccggttgcgactccccccgtcacctgtacatctccctgtacctgctgggtatccgtgcttccaacgtgtccgcttccacccgttgcctgctcgagtccgtgtacaccgcttccgctgctcgtgctgctctgcagtggctggacctgggtccccacctcctgcaccgtcgtctggaaaccctgggttgcgtcaagaccgtgtccctgggtatcacctccctgctgacctgcgtgatgcgcggctacctgtacaacaccctcaagaccgaggtgttcgctctgatgatccccaaggacatgtacctgacctgggaggaaacccgcggtcgtctgcagtacgtgtacctgatcatcgtgtacgactacgacggtcccgagactcgtcccggtatctacgtgctgacctcctctatcgctcactggcagaccctggtggacgtggcccgtggaaagttcgctcgtgaacgctgctccttcgtgaaccgtcgtatcacccgtccccgtcagatccccctgtgcaccggtgtcatccaaaagctgggctggtgcctggctgacgacatccacacctcattcctcgtgcacaaggaactgaagctgtccgtcgtgcgtctggacaacttctccgtcgagctgggcgacttccgcgagttcgtgtaaaagcttgtcgagaagtactagaggatcataatcagccataccacatttgtagaggttttacttgctttaaaaaacctcccacacctccccctgaacctgaaacataaaatgaatgcaattgttgttgttaacttgtttattgcagcttataatggttacaaataaagcaatagcatcacaaatttcacaaataaagcatttttttcactgcattctagttgtggtttgtccaaactcatcaatgtatcttatcatgtctggatctgatcactgcttgagcctagaagatccggctgctaacaaagcccgaaaggaagctgagttggctgctgccaccgctgagcaataactatcataacccctaggggcctctaaacgggtcttgaggggttttttgctgaaaggaggaactatatccggatctgaacaggagggacagctgatagaaacagaagccactggagcacctcaaaaacaccatcatacactaaatcagtaagttggcagcatcacccgacgcactttgcgccgaataaatacctgtgacggaagatcacttcgcagaataaataaatcctggtgtccctgttgataccgggaagccctgggccaacttttggcgaaaatgagacgttgatcggcacgtaagaggttccaactttcaccataatgaaataagatcactaccgggcgtattttttgagttatcgagattttcaggagctaaggaagctaaaatggagaaaaaaatcactggatataccaccgttgatatatcccaatggcatcgtaaagaacattttgaggcatttcagtcagttgctcaatgtacctataaccagaccgttcagctggatattacggcctttttaaagaccgtaaagaaaaataagcacaagttttatccggcctttattcacattcttgcccgcctgatgaatgctcatccggaattccgtatggcaatgaaagacggtgagctggtgatatgggatagtgttcacccttgttacaccgttttccatgagcaaactgaaacgttttcatcgctctggagtgaataccacgacgatttccggcagtttctacacatatattcgcaagatgtggcgtgttacggtgaaaacctggcctatttccctaaagggtttattgagaatatgtttttcgtctcagccaatccctgggtgagtttcaccagttttgatttaaacgtggccaatatggacaacttcttcgcccccgttttcaccatgggcaaatattatacgcaaggcgacaaggtgctgatgccgctggcgattcaggttcatcatgccgtttgtgatggcttccatgtcggcagaatgcttaatgaattacaacagtactgcgatgagtggcagggcggggcgtaatttttttaaggcagttattggtgcccttaaacgcctggttgctacgcctgaataagtgataataagcggatgaatggcagaaattcgaaagcaaattcgacccggtcgtcggttcagggcagggtcgttaaatagccgcttatgtctattgctggtttaccggtttattgactaccggaagcagtgtgaccgtgtgcttctcaaatgcctgaggccagtttgctcaggctctccccgtggaggtaataattgacgatatgatcatttattctgcctcccagctgacattcatccggggtcagcaccgtttctgcggactggctttctacgtgttccgcttcctttagcagcccttgcgccctgagtgcttgcggcagcgtgaagctaattctgtcagccgttaagtgttcctgtgtcactcaaaattgctttgagaggctctaagggcttctcagtgcgttacatccctggcttgttgtccacaaccgttaaaccttaaaagctttaaaagccttatatattcttttttttcttataaaacttaaaaccttagaggctatttaagttgctgatttatattaattttattgttcaaacatgagagcttagtacgtgaaacatgagagcttagtacgttagccatgagagcttagtacgttagccatgagggtttagttcgttaaacatgagagcttagtacgttaaacatgagagcttagtacgtgaaacatgagagcttagtacgtactatcaacaggttgaactgctgatcaacagatcctctacgcggccgcggtaccataacttcgtatagcatacattatacgaagttatctggtttaaacgtacccgtagtggctatggcagggcttgccgccccgacgttggctgcgagccctgggccttcacccgaacttgggggttggggtggggaaaaggaagaaacgcgggcgtattggtcccaatggggtctcggtggggtatcgacagagtgccagccctgggaccgaaccccgcgtttatgaacaaacgacccaacacccgtgcgttttattctgtctttttattgccgtcatagcgcgggttccttccggtattgtctccttccgtgtttcagttagcctcccccatctcccggtaccgcatgctatgcatcagctgctagcttagcgagcgtccacagcctggggaccgtaacgggagtgagcgggcaggttcacacgggtctgcttcagctcagggggcaggccagcgtagtacttgtccaggtgacgcagcaggggggggtccagctggtgacgcaggcagaattccttcacagcgttgtacaggccgtagaacagggtgataccctcgggagcagcagcggtggacacgggcagacgcacagcacggttggtacgggtagcctcgttacggatagccaccaccacgttgaacagggaggggggcaccagctcgaaacccagcacgtgttcggtgaagatggaacgaccgtaggacagacgagtcaggtcgtaaccacggcacaggtcgtccacgcaagtgtacacagcgggggaaccgtcgccgcactcggagtaaccgcgcatcacggtcatccaacggggagcggtgtcggaggacagcagggtcagcagagcacgcagctggtcggggttgttgtacagcagggccagggtgtccaggaaagcgtcgtccagcagcacggagttagcagcctcgggggtcacgggacggtaacggatcagctgggacaggggaccgtccctacgggtcacgttgaccaggggacgcagccaggactcgtacttgtcgccctggaacacctctcccagcaggcaacgacgggtcagctcggggcactcagcgggcaccttctcagccacggtgggagccacggacacggtagcggaggacacgatgggcagcagcaggcagcaccacagcagagccacgggaccgggggagaaggagaaaccgcagtcgggacgacggcacatggtggctcgagatcccgggtgatcaagtcttcgtcgagtgattgtaaataaaatgtaatttacagtatagtattttaattaatatacaaatgatttgataataattcttatttaactataatatattgtgttgggttgaattaaaggtccgtatactagtatcgattcgcgacctactccggaatattaatagatcatggagataattaaaatgataaccatctcgcaaataaataagtattttactgttttcgtaacagttttgtaataaaaaaacctataaatattccggattattcataccgtcccaccatcgggcgcggatccgccaccatgtcccccaagaacctgacccccttcctgaccgctctgtggctgctgctgggccactcccgtgtgcctcgtgtgcgtgctgaggaatgctgcgagttcatcaacgtgaaccacccccccgagcgctgctacgacttcaagatgtgcaaccgtttcaccgtggctctgcgttgccccgacggcgaagtgtgctactcccccgaaaagaccgctgagatccgtggtatcgtgaccaccatgacccactccctgacccgtcaggtggtgcacaacaagctgacctcttgcaactacaaccccctgtacctcgaggctgacggtcgtatccgttgcggcaaggtcaacgacaaggctcagtacctgctgggtgctgctggttccgtgccctaccgttggatcaacctcgagtacgacaagatcacccgtatcgtgggcctggaccagtacctcgagtccgtgaagaagcacaagcgtctggacgtgtgccgtgctaagatgggttacatgctgcagtaaaagcttgtcgagaagtactagaggatcataatcagccataccacatttgtagaggttttacttgctttaaaaaacctcccacacctccccctgaacctgaaacataaaatgaatgcaattgttgttgttaacttgtttattgcagcttataatggttacaaataaagcaatagcatcacaaatttcacaaataaagcatttttttcactgcattctagttgtggtttgtccaaactcatcaatgtatcttatcatgtctggatctgatcactgcttgagcctagaagatccggctgctaacaaagcccgaaaggaagctgagttggctgctgtggctagctttgtttaactttaagaaggagatacatctagaccggaatattaatagatcatggagataattaaaatgataaccatctcgcaaataaataagtattttactgttttcgtaacagttttgtaataaaaaaacctataaatattccggattattcataccgtcccaccatcgggcgcggatccgccaccatgctgcgtctgctgctgcgtcaccacttccactgcctgctgctgtgcgctgtgtgggctaccccctgcctggcttccccttggtccaccctgaccgctaaccagaacccctccccaccctggtccaagctgacctactccaagccccacgacgctgctaccttctactgccccttcctgtacccatccccccctcgttccccactgcagttctccggtttccagcgtgtgctgaccggtcccgagtgccgtaacgagactctgtacctgctgtacaaccgcgagggccagaccctggtcgagaggtcctccacctgggtcaagaaggtcatctggtacttgtccggtcgtaaccagaccatcctgcagcgtatgccccgtaccgcttccaagccctccgacggcaacgtgcagatctccgtcgaggacgctaagatcttcggtgctcacatggtgcccaagcagaccaagctgctgcgtttcgtggtcaacgacggcacccgttaccagatgtgcgtgatgaagctcgagtcctgggctcacgtgttccgtgactactccgtgtccttccaagtgcgcctgaccttcaccgaggctaacaaccagacctacaccttctgcacccaccccaacctgatcgtgtaaaagcttgtcgagaagtactagaggatcataatcagccataccacatttgtagaggttttacttgctttaaaaaacctcccacacctccccctgaacctgaaacataaaatgaatgcaattgttgttgttaacttgtttattgcagcttataatggttacaaataaagcaatagcatcacaaatttcacaaataaagcatttttttcactgcattctagttgtggtttgtccaaactcatcaatgtatcttatcatgtctggatctgatcactgcttgagcctagaagatccggctgctaacaaagcccgaaaggaagctgagttggctgctgggtgcctaatgagtgagctaactcacattaattgcccggaatattaatagatcatggagataattaaaatgataaccatctcgcaaataaataagtattttactgttttcgtaacagttttgtaataaaaaaacctataaatattccggattattcataccgtcccaccatcgggcgcggatccgccaccatgcgtctgtgccgtgtgtggctgtccgtgtgcctgtgcgctgtggtgctgggccagtgccagcgtgaaaccgctgagaagaacgactactaccgtgtgccccactactgggacgcttgctcccgtgctctgcccgaccagacccgttacaagtacgtcgagcagctggtggacctgaccctgaactaccactacgacgcttcccacggcctggacaacttcgacgtgctgaagcgtatcaacgtgaccgaggtgtccctgctgatctccgacttccgtcgtcagaaccgtcgtggtggcaccaacaagcgtaccaccttcaacgctgctggttccctggctccccacgctcgttccctcgagttctccgtgcgtctgttcgctaactaaaagcttgtcgagaagtactagaggatcataatcagccataccacatttgtagaggttttacttgctttaaaaaacctcccacacctccccctgaacctgaaacataaaatgaatgcaattgttgttgttaacttgtttattgcagcttataatggttacaaataaagcaatagcatcacaaatttcacaaataaagcatttttttcactgcattctagttgtggtttgtccaaactcatcaatgtatcttatcatgtctggatctgatcactgcttgagcctagaagatccggctgctaacaaagcccgaaaggaagctgagttggctgctgccaccgctgagcaataactatcataacccccggaatattaatagatcatggagataattaaaatgataaccatctcgcaaataaataagtattttactgttttcgtaacagttttgtaataaaaaaacctataaatattccggattattcataccgtcccaccatcgggcgcggatcccggtccgaagcgcgcggaattcaaaggcctaccgtcgacgccaccatggaatcccgtatctggtgcctggtcgtgtgcgtgaacctgtgcatcgtgtgcctgggtgctgctgtgtcctcctcctccacccgtggcacctccgctacccactcccaccactcctcccacaccacctccgccgctcactcccgttccggttccgtgtcccagcgtgtgacctcctcccagaccgtgtcccacggtgtcaacgagactatctacaacaccaccctgaagtacggcgacgtcgtgggtgtcaacaccaccaagtacccctaccgtgtgtgctccatggctcagggcaccgacctgatccgtttcgagcgtaacatcgtgtgcacctccatgaagcccatcaacgaggacctggacgagggtatcatggtggtgtacaagcgcaacatcgtggctcacaccttcaaggtccgcgtgtaccagaaggtgctgaccttccgtcgttcctacgcttacatccacaccacttacctgctgggttccaacaccgagtacgtggcccctcccatgtgggagatccaccacatcaactcccactcccagtgctactcctcttactcccgtgtgatcgctggcaccgtgttcgtggcttaccaccgtgactcctacgagaacaagaccatgcagctgatgcccgacgactactccaacacccactccacccgttacgtgaccgtgaaggaccagtggcactcccgtggttccacctggctgtaccgtgaaacctgcaacctgaactgcatggtcaccatcaccaccgctcgttccaagtacccttaccacttcttcgctacctccaccggcgacgtggtggacatctcccccttctacaacggtactaaccgtaacgcttcctacttcggcgagaacgctgacaagttcttcatcttccccaactacaccatcgtgtccgacttcggtcgtcccaactccgctctggaaacccaccgtctggtggctttcttggagcgtgctgactccgtgatctcctgggacatccaggacgagaagaacgtgacctgccagctgaccttctgggaggcttccgagcgtaccatccgttccgaggctgaggactcctaccacttctccagcgctaagatgaccgctaccttcctgtccaagaaacaagaggtcaacatgtccgactccgccctggactgcgtgcgtgacgaggctatcaacaagctgcagcagatcttcaacacctcctacaaccagacctacgagaagtacggaaacgtgtccgtgttcgagactaccggtggcctggtggtgttctggcagggtatcaagcagaagtccctggtcgagctggaacgtctggctaaccgttcctccctgaacctgacccacaaccgtaccaagcgttccaccgacggcaacaacgctactcacctgtccaacatggaatccgtgcacaacctggtgtacgctcagctgcagttcacctacgacaccctgcgcggttacatcaaccgtgctctggctcagatcgctgaggcttggtgcgtggaccagcgtcgtaccctggaagtgttcaaggaactgtccaagatcaacccctccgctatcctgtccgccatctacaacaagcctatcgctgctcgtttcatgggcgacgtgctgggcctggcttcctgcgtgaccatcaaccagacttccgtgaaggtgctgcgtgacatgaacgtgaaggaatcccccggtcgttgctactcccgtcccgtggtcatcttcaacttcgctaactcctcctacgtgcagtacggccagctgggcgaggacaacgagatcctgctgggcaaccaccgtaccgaggaatgccagctgccctccctgaagatcttcatcgctggcaactccgcttacgaatacgtggactacctgttcaagcgcatgatcgacctgtcctccatctctaccgtggactccatgatcgctctggacatcgaccccctggaaaacaccgacttccgtgtgctggaactgtactcccagaaggaactgcgttccatcaacgtgttcgacctggaagagatcatgcgcgagttcaactcctacaagcagcgtgttaagtacgtcgaggacaaggtggtggaccccctgcccccctacctgaagggactggacgacctgatgtccggcctgggagctgccggcaaggctgtgggtgtcgctatcggtgctgtgggtggtgctgtggcttccgtggtcgagggtgtcgccaccttcctgaagaaccccttcggtgctttcaccatcatcctggtggctatcgctgtggtcatcatcatctacctgatctacacccgtcagcgtcgtctgtgcatgcagcccctgcagaacctgttcccctacctggtgtccgctgacggtactaccgtgacctccggcaacaccaaggacacctccctgcaggctcccccatcctacgaggaatccgtctacaactccggtcgcaagggtcccggtcccccttcctccgacgcttctaccgctgctcccccatacaccaacgagcaggcttaccagatgctgctggctctcgtgcgtctggacgctgagcagcgtgcacagcagaacggcaccgactccctggacggccagaccggaacccaggacaagggccagaagcccaacctgctggaccgtctgcgtcaccgcaagaacggttaccgtcacctgaaggactccgacgaggaagagaacgtctaaggcgcgccaagcttgtcgagaagtactagagatcataatcagccataccacatttgtagaggttttacttgctttaaaaaacctcccacacctccccctgaacctgaaacataaaatgaatgcaattgttgttgttaacttgtttattgcagcttataatggttacaaataaagcaatagcatcacaaatttcacaaataaagcatttttttcactgcattctagttgtggtttgtccaaactcatcaatgtatcttatcatgtctggatctgatcactgcttgagcctagaagatccggctgctaacaaagcccgaaaggaagctgggaatattaatagatcatggagataattaaaatgataaccatctcgcaaataaataagtattttactgttttcgtaacagttttgtaataaaaaaacctataaatattccggattattcataccgtcccaccatcgggcgcggatccgccaccatgcgtcccggcctgccctcctacctgatcgtgctggctgtgtgcctgctgtcccacctcctgtcctcccgttacggtgctgaggctatctccgagcccctggacaaggctttccacctcctgctgaacacctacggtcgtcctatccgtttcctgcgcgagaacaccacccagtgcacctacaactcctccctgcgcaactccaccgtcgtccgcgagaacgctatctccttcaacttcttccagtcctacaaccagtactacgtgttccacatgccccgttgcctgttcgctggtcccctggctgagcagttcctgaaccaggtggacctgaccgagactctcgagcgttaccagcagcgtctgaacacttacgctctggtgtccaaggacctggcttcctaccgttccttcagccagcagctgaaggctcaggactccctgggcgagcagcccaccactgtgcctccccctatcgacctgtccatcccccacgtgtggatgcccccccagaccactcctcacggctggaccgagtcccacaccacctccggactgcaccgtccccacttcaaccagacctgcatcctgttcgacggtcacgacctgctgttctccaccgtgaccccctgcctgcaccagggcttctacctcatcgacgagctgcgttacgtgaagatcaccctgaccgaggatttcttcgtggtcaccgtgtccatcgacgacgacacccccatgctgctgatcttcggtcacctcccccgtgtgctgttcaaggctccctaccagcgtgacaacttcatcctgcgtcagaccgagaagcacgagctgctggtgctggtcaagaaggaccagctgaaccgtcactcttacctgaaggaccccgacttcctggacgctgctctggacttcaactacctggacctgtccgctctgctgaggaactccttccaccgttacgctgtggacgtgctgaagtccggtcgttgccagatgctggaccgtcgtaccgtcgagatggctttcgcttacgccctggctctgttcgctgctgctcgtcaagaagaggctggcgctcaggtgtccgtgccccgtgctctggaccgtcaggctgctctgctgcagatccaagagttcatgatcacttgcctgtcccagaccccccctcgtaccaccctgctgctgtaccccaccgctgtggacctggctaagcgtgctctgtggacccccaaccagatcaccgacatcacctccctcgtgcgtctggtgtacatcctgtccaagcagaaccagcagcacctgatcccccagtgggctctgcgtcagatcgctgacttcgctctgaagctgcacaagacccacctggcttcattcctcagcgctttcgctcgccaagagctgtacctgatgggttccctggtgcactccatgctggtgcacaccaccgagcgtcgcgagatcttcatcgtggaaaccggcctgtgctccctggccgagctgtcccacttcacccagctgctggctcacccccaccacgagtacctgtccgacctgtacaccccctgctcctcttccggtcgtcgtgaccactccctggaacgtctgacccgtctgttccccgacgctaccgtgcctaccaccgtgcctgctgctctgtccatcctgtctaccatgcagccctccaccctggaaaccttccccgacctgttctgcctgcctctgggcgagtccttctccgctctgaccgtgtccgagcacgtgtcctacgtggtcaccaaccagtacctgatcaagggcatctcctaccccgtgtccaccaccgtcgtgggccagtccctgatcatcacccagaccgactcccagaccaagtgcgagctgacccgtaacatgcacaccactcactccatcaccgctgctctgaacatctccctcgagaactgcgctttctgccagtccgctctgttggagtacgacgacactcagggtgtcatcaacatcatgtacatgcacgactccgacgacgtgctgttcgctctggacccctacaacgaggtggtggtgtcctccccccgtacccactacctgatgctgctgaagaacggcaccgtgctggaagtgaccgacgtggtggtggacgctaccgaccgtctgctgatgatgtccgtgtacgctctgtccgctatcatcggcatctacctgctgtaccgtatgctgaagacctgctaaggcgccaagctttgtcgagaagtactagaggatcataatcagccataccacatttgtagaggttttacttgctttaaaaaacctcccacacctccccctgaacctgaaacataaaatgaatgcaattgttgttgttaacttgtttattgcagcttataatggttacaaataaagcaatagcatcacaaatttcacaaataaagcatttttttcactgcattctagttgtggtttgtccaaactcatcaatgtatcttatcatgtctggatctgatcactgcttgagcctagaagatccggctgctaacaaagcccgaaaggaagctgagttggctgctgctgagtagtgcgcgagcaaaatttaagctacaacaaggcacgcgtccggaatattaatagatcatggagataattaaaatgataaccatctcgcaaataaataagtattttactgttttcgtaacagttttgtaataaaaaaacctataaatattccggattattcataccgtcccaccatcgggcgcggatcccggtccgaagcgcgcggaattcaaaggcctacgtcgacgccaccatggaatcccgtggtcgtcgttgccccgagatgatctccgtgctgggtcccatctccggtcacgtcctgaaggctgtgttctcccgtggcgacacccccgtgctgccccacgaaactcgtctgctgcagaccggtatccacgtgcgtgtgtcccagccctccctgatcctggtgtcccagtacacccccgactccaccccttgccaccgcggagacaaccagctgcaggtccagcacacctacttcaccggttccgaggtcgagaacgtgtccgtgaacgtgcacaaccccaccggtcgttccatctgcccctcccaagagcccatgtccatctacgtgtacgctctgcccctgaagatgctgaacatcccctccatcaacgtgcaccactacccctccgctgctgagcgcaagcaccgtcacctccccgtggctgacgctgtgatccacgcttccggcaagcagatgtggcaggctcgtctgaccgtgtccggcctggcttggacccgtcagcagaaccagtggaaggaacccgacgtgtactacacctccgctttcgtgttccccaccaaggacgtggccctgcgtcacgtcgtgtgcgctcacgaactcgtgtgctccatggaaaacacccgtgctaccaagatgcaagtgatcggcgaccagtacgtgaaggtgtacctggaatccttctgcgaggacgtgccctccggcaagctgttcatgcacgtgaccctgggttccgacgtggaagaggacctgaccatgacccgtaacccccagcccttcatgcgtccccacgagcgtaacggtttcaccgtgctgtgccccaagaacatgatcatcaagcccggcaagatctcccacatcatgctggacgtggccttcacctcccacgagcacttcggcctgctgtgccctaagtccatccccggcctgtccatctccggcaacctgctgatgaacggccagcagatcttcctggaagtgcaggctatccgtgaaaccgtcgagctgcgtcagtacgaccctgtggctgctctgttcttcttcgacatcgacctgctgctgcagcgtggtccccagtactccgagcaccccaccttcaccagccagtaccgtatccagggcaagctggaataccgtcacacctgggaccgtcacgacgagggtgctgctcagggcgacgacgacgtgtggacctccggttccgactccgacgaggaactggtcaccaccgagcgcaagaccccccgtgtgaccggtggtggtgctatggctggtgcttccacctccgctggtcgcaagcgcaagtccgcttcctccgctaccgcttgcaccgctggtgtcatgacccgtggtcgcctgaaggctgagtccaccgtggctcccgaagaggacactgacgaggactccgacaacgagatccacaaccccgctgtgttcacctggcccccctggcaggctggtatcctggctcgtaacctggtgcccatggtggctaccgtgcagggccagaacctgaagtaccaagagttcttctgggacgccaacgacatctaccgtatcttcgctgagctggaaggcgtgtggcagcccgctgctcagcccaagcgtcgtcgtcaccgtcaggacgctctgcctggtccctgtatcgcttccacccccaagaagcaccgcggctaaaagcttgtcgagaagtactagaggatcataatcagccataccacatttgtagaggttttacttgctttaaaaaacctcccacacctccccctgaacctgaaacataaaatgaatgcaattgttgttgttaacttgtttattgcagcttataatggttacaaataaagcaatagcatcacaaatttcacaaataaagcatttttttcactgcattctagttgtggtttgtccaaactcatcaatgtatcttatcatgtctggatctgatcactgcttgagcctagaagatccggctgctaacaaagcccgaaaggaagctgagttggctgctgccaccgctgagcaataactatcataacccctaggagatccgaaccagataagtgaaatctagttccaaactattttgtcatttttaattttcgtattagcttacgacgctacacccagttcccatctattttgtcactcttccctaaataatccttaaaaactccatttccacccctcccagttcccaactattttgtccgcccaca

SEQ ID NO: 57 - DNA, 26483 bp, Artificial Sequence
  Synthetic construct
ttaggtggcggtacttgggtcgatatcaaagtgcatcacttcttcccgtatgcccaactttgtatagagagccactgcgggatcgtcaccgtaatctgcttgcacgtagatcacataagcaccaagcgcgttggcctcatgcttgaggagattgatgagcgcggtggcaatgccctgcctccggtgctcgccggagactgcgagatcatagatatagatctcactacgcggctgctcaaacttgggcagaacgtaagccgcgagagcgccaacaaccgcttcttggtcgaaggcagcaagcgcgatgaatgtcttactacggagcaagttcccgaggtaatcggagtccggctgatgttgggagtaggtggctacgtctccgaactcacgaccgaaaagatcaagagcagcccgcatggatttgacttggtcagggccgagcctacatgtgcgaatgatgcccatacttgagccacctaactttgttttagggcgactgccctgctgcgtaacatcgttgctgctgcgtaacatcgttgctgctccataacatcaaacatcgacccacggcgtaacgcgcttgctgcttggatgcccgaggcatagactgtacaaaaaaacagtcataacaagccatgaaaaccgccactgcgccgttaccaccgctgcgttcggtcaaggttctggaccagttgcgtgagcgcatacgctacttgcattacagtttacgaaccgaacaggcttatgtcaactgggtttgtgccttcatccgtttccacggtgtgcgtcacccggcaaccttgggcagcagcgaagtcgaggcatttctgtcctggctggcgaacgagcgcaaggtttcggtctccacgcatcgtcaggcattggcggccttgctgttcttctacggcaaggtgctgtgcacggatctgcccttgcttcaggagatcggtagacctcggccgtcgcggcgcttgccggtggtgctgaccccggatgaagtggttcgcatcctcggttttctggaaggcgagcatcgtttgttcgcccaggactctagctatagttctagtggttggctacagctttgtttgtactatcaacaggttgaactgctgatcaacagatcctctacgcggccgcggtaccataacttcgtatagcatacattatacgaagttatctggtttaaacgtacccgtagtggctatggcagggcttgccgccccgacgttggctgcgagccctgggccttcacccgaacttgggggttggggtggggaaaaggaagaaacgcgggcgtattggtcccaatggggtctcggtggggtatcgacagagtgccagccctgggaccgaaccccgcgtttatgaacaaacgacccaacacccgtgcgttttattctgtctttttattgccgtcatagcgcgggttccttccggtattgtctccttccgtgtttcagttagcctcccccatctcccggtaccgcatgctatgcatcagctgctagcaccatggctcgagatcccgggtgatcaagtcttcgtcgagtgattgtaaataaaatgtaatttacagtatagtattttaattaatatacaaatgatttgataataattcttatttaactataatatattgtgttgggttgaattaaaggtccgtatactagtatcgattcgcgacctactccggaatattaatagatcatggagataattaaaatgataaccatctcgcaaataaataagtattttactgttttcgtaacagttttgtaataaaaaaacctataaatattccggattattcataccgtcccaccatcgggcgcggatccgccaccatggaaaactggtccgctctggaactgctgcccaaggtcggaatccctaccgacttcctgacccacgtcaagacctccgctggcgaggaaatgttcgaggctctgaggatctactacggcgacgaccccgagcgttacaacatccacttcgaggctatcttcggcaccttctgcaaccgtctggaatgggtgtacttcctgacttccggcctggctgctgctgctcacgctatcaagttccacgacctgaacaagctgaccaccggcaagatgctgttccacgtgcaagtgccccgtgtggcttccggtgctggcctgcctacctcccgtcagaccaccatcatggtcaccaagtactccgagaagtcccccatcaccatccctttcgagctgtccgctgcttgcctgacttacctgcgtgaaaccttcgagggcaccatcctggacaagatcctgaacgtcgaggctatgcacaccgtgctgcgtgctctgaagaacaccgctgacgctatggaacgtggcctgatccacagcttcctccagaccctgctgaggaaggctcccccctacttcgtggtgcagaccctggtcgagaacgctaccctggctcgtcaggctctgaaccgtatccagcgctccaacatcctgcagtccttcaaggctaagatgctggctaccctgttcctgctgaaccgtacccgtgaccgtgactacgtgctgaagttcctgacccgtctggctgaggctgctaccgactccatcctcgacaaccctactacctacaccacctcctccggtgctaagatctccggtgtcatggtgtccaccgctaacgtgatgcagatcatcatgtccctgctgtcctcccacatcactaaggaaaccgtgtccgctcccgctacctacggcaacttcgtgctgtcccccgagaacgctgtgaccgctatctcctaccactctatcctggctgacttcaactcctacaaggctcacctgacctccggccagccccacctccccaacgactccctgagccaggctggtgctcactccctgacccccctgtccatggacgtgatccgtctgggcgaaaagaccgtgatcatggaaaacctgcgtcgcgtgtacaagaacaccgacaccaaggaccccctggaacgtaacgtggacctgaccttcttcttccccgtgggcctgtacctgcccgaggaccgtggttacaccaccgtcgagtccaaggtcaagctgaacgacaccgtgcgtaacgctctgcccaccaccgcttacctgctgaacagggaccgtgctgtgcaaaagatcgacttcgtggacgctctcaagaccctgtgccaccccgtgctgcacgagcctgctccatgcctgcaggctttcaccgagcgtggtcccccatccgagcccgctatgcagcgtctgctggaatgccgtttccagcaagagcccatgggtggtgctgctcgtcgtatcccccacttctaccgtgtgcgccgcgaggtgccccgtaccgtgaacgagatgaagcaggacttcgtggtcaccgacttctacaaggttggaaacatcaccctgtacaccgagctgcaccctttcttcgacttcacccactgccaagagaactccgagactgtggctctgtgcaccccccgtatcgtgatcggcaacctgcccgacggcctggctcccggtcccttccacgagctgaggacctgggagatcatggaacacatgcgcctgcgtcccccacccgactacgaggaaaccctgcgtctgttcaagaccaccgtgacctcccccaactaccccgagctgtgctacctggtggacgtgctggtgcacggcaacgctgacgctttcctgctgatccgcgctttcatcgctcgttgcatcgtgaacatgttccacacccgtcagctgctggtgttcgctcactcctacgctctggtcaccctgatcgctgagcacctggctgacggtgctctgcccccccagctcctgttccactaccgtaacctggtggctgtgctgcgcctggtcacccgtatctccgctctgcccggcctgaacaacggccagctggctgaggaacccctgtccgcttacgtgaacgctctgcacgaccacaggctgtggccccccttcgtgacccacctccctcgtaacatggaaggtgtccaggtggtggctgatcgtcagcccctgaaccccgctaacatcgaggctcgtcaccacggtgtctccgacgtgccccgtctgggtgctatggacgctgacgagcccctgttcgtggacgactaccgtgctaccgacgacgagtggaccctgcaaaaggtgttctacctgtgcctgatccccgctatgaccaacaaccgtgcttgcggcctgggcctgaacctcaagactctgctggtggacctgttctaccgtcccgccttcctgctcatgcccgctgctaccgctgtgtccacctccggcaccacctccaaggaatccacctctggtgtcacccccgaggactccgtggctgctcagcgtcaggctgtgggcgagatgctgaccgagctggtcgaggacgtggccaccgacgctcacacccctctgctgcaggcttgccgcgagctgttcctggctgtgcagttcgtgggcgagcacgtgaaggtgctggaagtgcgtgctcccctggaccacgctcagaggcagggactgcccgacttcatctcccgtcagcatgtgctgtacaacggttgctgcgtcgtgaccgctcctaagaccctgatcgagtactccctgcccgtgcccttccaccgtttctactccaaccccaccatctgcgctgctctgtccgacgacatcaagcgttacgtgaccgagttcccccactaccatagacacgatggtggtttccccctgcccaccgctttcgctcacgagtaccacaactggctgcgtagccccttctcccgttactccgctacctgccccaacgtgctgcactccgtgatgaccctggctgctatgctgtacaagatctcccccgtgtccctggtgctgcagaccaaggctcacatccaccccggtttcgctctgaccgctgtgcgtaccgacaccttcgaggtggacatgctgctgtactccggcaagtcctgcacctccgtcatcatcaacaaccccatcgtgaccaaggaagagagggacatctccaccacctaccacgtgacccagaacatcaacaccgtggacatgggcctgggttacacctccaacacttgcgtggcctacgtgaaccgcgtccgcaccgacatgggtgtccgtgtgcaggacctgttccgtgtgttccccatgaacgtgtaccgccacgatgaggtggaccgttggatcaggcacgctgctggcgtcgagcgtccccagctgctggacaccgagactatctccatgctgaccttcggttccatgtccgagcgcaacgctgctgctaccgtgcacggccagaaggctgtctgcgagctgatcctgacccctgtgactatggacgtgaactacttcaagatcaccaacaaccctcgtggtcgtgcttcctgcatgctgggcgtggacccctacgacaccgaggctgccaccaaggctatctacgaccaccgcgaggctgacgctcagaccttcgctgctacccacaacccatgggcttcccaggctggttgcctgtccgacgtcctgtacaacacccgtcaccgcgagcgtctgggctacaactccaagttctactccccctgcgctcagtacttcaacaccgaggaaatcatcgctgccaacaagaccctcttcaagaccatcgacgagtacctgctgcgcgctaaggactgcatccgtggcgacaccgacactcagtacgtgtgcgtcgagggaaccgagcagctgatcgagaacccttgccgtctgacccaagaggctctgcccatcctgtccaccaccaccctggctctgatggaaactaagctgaagggtggcgctggtgctttcgctacctccgagactcacttcggcaactacgtcgtgggagagatcatccccctgcagcagtccatgctgttcaacagctaagagctcaagcttgtcgagaagtactagaggatcataatcagccataccacatttgtagaggttttacttgctttaaaaaacctcccacacctccccctgaacctgaaacataaaatgaatgcaattgttgttgttaacttgtttattgcagcttataatggttacaaataaagcaatagcatcacaaatttcacaaataaagcatttttttcactgcattctagttgtggtttgtccaaactcatcaatgtatcttatcatgtctggatctgatcactgcttgagcctagaagatccggctgctaacaaagcccgaaaggaagctgagttggctgctgcccaccgctgagcaataactatcataacccccggaatattaatagatcatggagataattaaaatgataaccatctcgcaaataaataagtattttactgttttcgtaacagttttgtaataaaaaaacctataaatattccggattattcataccgtcccaccatcgggcgcggatccgccaccatggctgctatggaagctaacatcttctgcaccttcgaccacaagctgtctatcgctgacgtgggcaagctgaccaagctggtggctgctgtggtgcccatcccccagcgtctgcacctgatcaagcactaccagctgggcctgcaccagttcgtggaccacacccgtggttacgtgcgtctgcgtggcctgctgcgtaacatgaccctgaccctgatgcgtcgtgtcgagggcaaccagatcctgctgcacgtgcccacccacggcctgctgtacaccgtgctgaacaccggtcccgtgacctgggagaagggcgacgctctgtgcgtgctgccccccctgttccacggtcccctggctcgtgaaaacctgttgaccctgggccagtgggagctggtgctgccctggatcgtgcccatgcccctggctctggaaatcaaccagcgcctgctgatcatgggcctgttctccctggaccgttcctacgaagaagtgaaggctgctgtccagcagctgcagaccatcaccttccgtgacgctaccttcaccatccccgaccccgtgatcgaccagcacctcctgatcgacatgaagaccgcttgcctgtccatgtccatggtggctaacctggcttccgagctgaccatgacctacgtccgcaagctggctttggaggactcttccatgctgctggtcaagtgccaagagctgctgatgcgtctggaccgcgagcgttccgtgggcgagcctcgtactcccgctcgtcctcagcacgtgtcccccgacgacgagatcgctcgtctgtccgctctgttcgtgatgctgcgtcagctggacgacctgatccgcgagcaggtcgtgttcaccgtgtgcgacgtgagcccagacaacaagtccgctacctgcatcttcaagggctaaggcgcgccaagcttgtcgagaagtactagaggatcataatcagccataccacatttgtagaggttttacttgctttaaaaaacctcccacacctccccctgaacctgaaacataaaatgaatgcaattgttgttgttaacttgtttattgcagcttataatggttacaaataaagcaatagcatcacaaatttcacaaataaagcatttttttcactgcattctagttgtggtttgtccaaactcatcaatgtatcttatcatgtctggatctgatcactgcttgagcctagaagatccggctgctaacaaagcccgaaaggaagctgagttggctgctgccaccgctgagcaataactatcataacccccggaatattaatagatcatggagataattaaaatgataaccatctcgcaaataaataagtattttactgttttcgtaacagttttgtaataaaaaaacctataaatattccggattattcataccgtcccaccatcgggcgcggatcccggtccgaagcgcgcggaattcaaaggcctgccaccatggaaatgaacaaggtgctgcatcaggatctggtgcaggctacccgtcgtatcctgaagctgggcccctccgagctgcgtgtgaccgacgctggcctgatctgcaagaaccccaactactccgtgtgcgacgctatgctcaagaccgacaccgtgtactgcgtcgagtacctgctgtcctactgggagtcccgtaccgaccacgtgccctgcttcatcttcaagaacaccggttgcgctgtgtccctgtgctgcttcgtgcgtgctcccgtgaagctggtgtcccctgctcgtcacgtgggcgagttcaacgtgctgaaggtcaacgagtccctgatcgtgaccctgaaggacatcgaggaaatcaagccctccgcttacggtgtcctgactaagtgcgtcgtccgcaagtccaactccgcttccgtgttcaacatcgagctgatcgctttcggtcccgagaacgagggcgagtacgagaacctgctgcgcgagctgtacgctaagaaggctgcttccacctccctggctgtgcgtaaccacgtgaccgtgtcctcccactccggttccggtccctccctgtggcgtgctcgtatgtccgctgctctgacccgtaccgctggcaagcgctcctccaggactgctagccctccaccaccacctcctcgtcaccctagctgctctcccactatggtggctgctggtggagctgctgctggtcctagacctccccctcctcctatggctgctggatcctggcgtctgtgccgttgcgaggcttgcatgggccgttgcggttgcgcttccgagggcgacgctgacgaggaagaggaagagttgctggctctggctggcgagggcaaggctgctgctgccgctgccggtcaagacgtcggtggttccgctcgtcgtcccctcgaggaacacgtgtcccgtcgtcgtggtgtctccacccaccaccgtcaccccccttccccaccttgcgctccctccctggaacgtaccggttaccgttgggctccttcctcctggtggcgcgctcgttctggtccttcccgtccccagtccggtccctggctgcctgctcgtttcgctaccctgggtcccctggtcctggctctgctgttggtgctggccctgctgtggcgtggtcacggtcaatcccccagccccacccgttccgctcaccgtgactaaaagcttgtcgagaagtactagaggatcataatcagccataccacatttgtagaggttttacttgctttaaaaaacctcccacacctccccctgaacctgaaacataaaatgaatgcaattgttgttgttaacttgtttattgcagcttataatggttacaaataaagcaatagcatcacaaatttcacaaataaagcatttttttcactgcattctagttgtggtttgtccaaactcatcaatgtatcttatcatgtctggatctgatcactgcttgagcctagaagatccggctgctaacaaagcccgaaaggaagctgagttggctgctgtggctagctttgtttaactttaagaaggagatacatctagaaatattaatagatcatggagataattaaaatgataaccatctcgcaaataaataagtattttactgttttcgtaacagttttgtaataaaaaaacctataaatattccggattattcataccgtcccaccatcgggcgcggatcccggtccgaagcgcgcggaattcaaaggcctacgtcgacgccaccatgtccaacaccgctcccggtcccaccgtggctaacaagcgtgacgagaagcaccgtcacgtggtcaacgtggtgctcgagctgcccaccgagatctccgaggctacccaccccgtgctggctaccatgctgtccaagtacacccgtatgtcctccctgttcaacgacaagtgcgctttcaagctggacctgctgcgtatggtggctgtgtcccgtacccgtcgctaaaagcttgtcgagaagtactagaggatcataatcagccataccacatttgtagaggttttacttgctttaaaaaacctcccacacctccccctgaacctgaaacataaaatgaatgcaattgttgttgttaacttgtttattgcagcttataatggttacaaataaagcaatagcatcacaaatttcacaaataaagcatttttttcactgcattctagttgtggtttgtccaaactcatcaatgtatcttatcatgtctggatctgatcactgcttgagcctagaagatccggctgctaacaaagcccgaaaggaagctgagttggctgctgggtgcctaatgagtgagctaactcacattaattgcccggaatattaatagatcatggagataattaaaatgataaccatctcgcaaataaataagtattttactgttttcgtaacagttttgtaataaaaaaacctataaatattccggattattcataccgtcccaccatcgggcgcggatcccggtccgaagcgcgcggaattcgccaccatggacgctcgtgctgtggctaagcgtccccgtgaccccgctgacgaggacaacgagctggtcaccgctctgaaggctaagcgtgaagtgaacaccatctccgtgcgttacctgtaccacgctgaccaccaggctctgaccgctcgtttcttcgtgcccgagggcctggtcgagttcgaggctcagcccggtgctctgctgatccgtatggaaaccggttgcgactccccccgtcacctgtacatctccctgtacctgctgggtatccgtgcttccaacgtgtccgcttccacccgttgcctgctcgagtccgtgtacaccgcttccgctgctcgtgctgctctgcagtggctggacctgggtccccacctcctgcaccgtcgtctggaaaccctgggttgcgtcaagaccgtgtccctgggtatcacctccctgctgacctgcgtgatgcgcggctacctgtacaacaccctcaagaccgaggtgttcgctctgatgatccccaaggacatgtacctgacctgggaggaaacccgcggtcgtctgcagtacgtgtacctgatcatcgtgtacgactacgacggtcccgagactcgtcccggtatctacgtgctgacctcctctatcgctcactggcagaccctggtggacgtggcccgtggaaagttcgctcgtgaacgctgctccttcgtgaaccgtcgtatcacccgtccccgtcagatccccctgtgcaccggtgtcatccaaaagctgggctggtgcctggctgacgacatccacacctcattcctcgtgcacaaggaactgaagctgtccgtcgtgcgtctggacaacttctccgtcgagctgggcgacttccgcgagttcgtgtaaaagcttgtcgagaagtactagaggatcataatcagccataccacatttgtagaggttttacttgctttaaaaaacctcccacacctccccctgaacctgaaacataaaatgaatgcaattgttgttgttaacttgtttattgcagcttataatggttacaaataaagcaatagcatcacaaatttcacaaataaagcatttttttcactgcattctagttgtggtttgtccaaactcatcaatgtatcttatcatgtctggatctgatcactgcttgagcctagaagatccggctgctaacaaagcccgaaaggaagctgagttggctgctgccaccgctgagcaataactatcataacccctaggggcctctaaacgggtcttgaggggttttttgctgaaaggaggaactatatccggatctgaacaggagggacagctgatagaaacagaagccactggagcacctcaaaaacaccatcatacactaaatcagtaagttggcagcatcacccgacgcactttgcgccgaataaatacctgtgacggaagatcacttcgcagaataaataaatcctggtgtccctgttgataccgggaagccctgggccaacttttggcgaaaatgagacgttgatcggcacgtaagaggttccaactttcaccataatgaaataagatcactaccgggcgtattttttgagttatcgagattttcaggagctaaggaagctaaaatggagaaaaaaatcactggatataccaccgttgatatatcccaatggcatcgtaaagaacattttgaggcatttcagtcagttgctcaatgtacctataaccagaccgttcagctggatattacggcctttttaaagaccgtaaagaaaaataagcacaagttttatccggcctttattcacattcttgcccgcctgatgaatgctcatccggaattccgtatggcaatgaaagacggtgagctggtgatatgggatagtgttcacccttgttacaccgttttccatgagcaaactgaaacgttttcatcgctctggagtgaataccacgacgatttccggcagtttctacacatatattcgcaagatgtggcgtgttacggtgaaaacctggcctatttccctaaagggtttattgagaatatgtttttcgtctcagccaatccctgggtgagtttcaccagttttgatttaaacgtggccaatatggacaacttcttcgcccccgttttcaccatgggcaaatattatacgcaaggcgacaaggtgctgatgccgctggcgattcaggttcatcatgccgtttgtgatggcttccatgtcggcagaatgcttaatgaattacaacagtactgcgatgagtggcagggcggggcgtaatttttttaaggcagttattggtgcccttaaacgcctggttgctacgcctgaataagtgataataagcggatgaatggcagaaattcgaaagcaaattcgacccggtcgtcggttcagggcagggtcgttaaatagccgcttatgtctattgctggtttaccggtttattgactaccggaagcagtgtgaccgtgtgcttctcaaatgcctgaggccagtttgctcaggctctccccgtggaggtaataattgacgatatgatcatttattctgcctcccagctgacattcatccggggtcagcaccgtttctgcggactggctttctacgtgttccgcttcctttagcagcccttgcgccctgagtgcttgcggcagcgtgaagctaattctgtcagccgttaagtgttcctgtgtcactcaaaattgctttgagaggctctaagggcttctcagtgcgttacatccctggcttgttgtccacaaccgttaaaccttaaaagctttaaaagccttatatattcttttttttcttataaaacttaaaaccttagaggctatttaagttgctgatttatattaattttattgttcaaacatgagagcttagtacgtgaaacatgagagcttagtacgttagccatgagagcttagtacgttagccatgagggtttagttcgttaaacatgagagcttagtacgttaaacatgagagcttagtacgtgaaacatgagagcttagtacgtactatcaacaggttgaactgctgatcaacagatcctctacgcggccgcggtaccataacttcgtatagcatacattatacgaagttatctggtttaaacgtacccgtagtggctatggcagggcttgccgccccgacgttggctgcgagccctgggccttcacccgaacttgggggttggggtggggaaaaggaagaaacgcgggcgtattggtcccaatggggtctcggtggggtatcgacagagtgccagccctgggaccgaaccccgcgtttatgaacaaacgacccaacacccgtgcgttttattctgtctttttattgccgtcatagcgcgggttccttccggtattgtctccttccgtgtttcagttagcctcccccatctcccggtaccgcatgctatgcatcagctgctagcttagcgagcgtccacagcctggggaccgtaacgggagtgagcgggcaggttcacacgggtctgcttcagctcagggggcaggccagcgtagtacttgtccaggtgacgcagcaggggggggtccagctggtgacgcaggcagaattccttcacagcgttgtacaggccgtagaacagggtgataccctcgggagcagcagcggtggacacgggcagacgcacagcacggttggtacgggtagcctcgttacggatagccaccaccacgttgaacagggaggggggcaccagctcgaaacccagcacgtgttcggtgaagatggaacgaccgtaggacagacgagtcaggtcgtaaccacggcacaggtcgtccacgcaagtgtacacagcgggggaaccgtcgccgcactcggagtaaccgcgcatcacggtcatccaacggggagcggtgtcggaggacagcagggtcagcagagcacgcagctggtcggggttgttgtacagcagggccagggtgtccaggaaagcgtcgtccagcagcacggagttagcagcctcgggggtcacgggacggtaacggatcagctgggacaggggaccgtccctacgggtcacgttgaccaggggacgcagccaggactcgtacttgtcgccctggaacacctctcccagcaggcaacgacgggtcagctcggggcactcagcgggcaccttctcagccacggtgggagccacggacacggtagcggaggacacgatgggcagcagcaggcagcaccacagcagagccacgggaccgggggagaaggagaaaccgcagtcgggacgacggcacatggtggctcgagatcccgggtgatcaagtcttcgtcgagtgattgtaaataaaatgtaatttacagtatagtattttaattaatatacaaatgatttgataataattcttatttaactataatatattgtgttgggttgaattaaaggtccgtatactagtatcgattcgcgacctactccggaatattaatagatcatggagataattaaaatgataaccatctcgcaaataaataagtattttactgttttcgtaacagttttgtaataaaaaaacctataaatattccggattattcataccgtcccaccatcgggcgcggatccgccaccatgaactccaaggacctgacccccttcctgaccaccctgtggctgctgctggaccactcccgtgtgcctcgtgtgcgtgctgaggaatgctgcgaagtgatcaacgtgaaccacccccccgagcgctgctacgacttcaagatgtgcaacctgttcaccgtggctctgcgttgccccgacggcgaagtgtgctactcccccgaaaagaccgctgagatccgtggtatcgtgaccaccatgacccactccctgacccgtcaagtgatccacaacaagctgaccagctgcaactacaaccccctgtacctcgaggctgacggtcgtatccgttgcggcaaggtgtccgacaaggctcagtacctgctgggtgctgctggttccgtgccctaccgttggatcaacctcgagtacgacaagatcacccgtatcgtgggcctggaccagtacctcgagtccgtgaagaagcacaagcgtctggacgtgtgccgtgctaagatgggttacatgctgcagtaaaagcttgtcgagaagtactagaggatcataatcagccataccacatttgtagaggttttacttgctttaaaaaacctcccacacctccccctgaacctgaaacataaaatgaatgcaattgttgttgttaacttgtttattgcagcttataatggttacaaataaagcaatagcatcacaaatttcacaaataaagcatttttttcactgcattctagttgtggtttgtccaaactcatcaatgtatcttatcatgtctggatctgatcactgcttgagcctagaagatccggctgctaacaaagcccgaaaggaagctgagttggctgctgtggctagctttgtttaactttaagaaggagatacatctagaccggaatattaatagatcatggagataattaaaatgataaccatctcgcaaataaataagtattttactgttttcgtaacagttttgtaataaaaaaacctataaatattccggattattcataccgtcccaccatcgggcgcggatccgccaccatgctgcgtctgctgctgcgtcaccacttccactgcctgctgctgtgcgctgtgtgggctaccccctgcctggcttccccttggtccaccctgaccgctaaccagaacccctccccaccctggtccaagctgacctactccaagccccacgacgctgctaccttctactgccccttcctgtacccatccccccctcgttccccactgcagttctccggtttccagcgtgtgctgaccggtcccgagtgccgtaacgagactctgtacctgctgtacaaccgcgagggccagaccctggtcgagaggtcctccacctgggtcaagaaggtcatctggtacttgtccggtcgtaaccagaccatcctgcagcgtatgccccgtaccgcttccaagccctccgacggcaacgtgcagatctccgtcgaggacgctaagatcttcggtgctcacatggtgcccaagcagaccaagctgctgcgtttcgtggtcaacgacggcacccgttaccagatgtgcgtgatgaagctcgagtcctgggctcacgtgttccgtgactactccgtgtccttccaagtgcgcctgaccttcaccgaggctaacaaccagacctacaccttctgcacccaccccaacctgatcgtgtaaaagcttgtcgagaagtactagaggatcataatcagccataccacatttgtagaggttttacttgctttaaaaaacctcccacacctccccctgaacctgaaacataaaatgaatgcaattgttgttgttaacttgtttattgcagcttataatggttacaaataaagcaatagcatcacaaatttcacaaataaagcatttttttcactgcattctagttgtggtttgtccaaactcatcaatgtatcttatcatgtctggatctgatcactgcttgagcctagaagatccggctgctaacaaagcccgaaaggaagctgagttggctgctgggtgcctaatgagtgagctaactcacattaattgcccggaatattaatagatcatggagataattaaaatgataaccatctcgcaaataaataagtattttactgttttcgtaacagttttgtaataaaaaaacctataaatattccggattattcataccgtcccaccatcgggcgcggatccgccaccatgcgtctgtgccgtgtgtggctgtccgtgtgcctgtgcgctgtggtgctgggccagtgccagcgtgaaaccgctgagaagaacgactactaccgtgtgccccactactgggacgcttgctcccgtgctctgcccgaccagacccgttacaagtacgtcgagcagctggtggacctgaccctgaactaccactacgacgcttcccacggcctggacaacttcgacgtgctgaagcgtatcaacgtgaccgaggtgtccctgctgatctccgacttccgtcgtcagaaccgtcgtggtggcaccaacaagcgtaccaccttcaacgctgctggttccctggctccccacgctcgttccctcgagttctccgtgcgtctgttcgctaactaaaagcttgtcgagaagtactagaggatcataatcagccataccacatttgtagaggttttacttgctttaaaaaacctcccacacctccccctgaacctgaaacataaaatgaatgcaattgttgttgttaacttgtttattgcagcttataatggttacaaataaagcaatagcatcacaaatttcacaaataaagcatttttttcactgcattctagttgtggtttgtccaaactcatcaatgtatcttatcatgtctggatctgatcactgcttgagcctagaagatccggctgctaacaaagcccgaaaggaagctgagttggctgctgccaccgctgagcaataactatcataacccccggaatattaatagatcatggagataattaaaatgataaccatctcgcaaataaataagtattttactgttttcgtaacagttttgtaataaaaaaacctataaatattccggattattcataccgtcccaccatcgggcgcggatcccggtccgaagcgcgcggaattcaaaggcctaccgtcgacgccaccatggaatcccgtatctggtgcctggtcgtgtgcgtgaacctgtgcatcgtgtgcctgggtgctgctgtgtcctcctcctccacccgtggcacctccgctacccactcccaccactcctcccacaccacctccgccgctcactcccgttccggttccgtgtcccagcgtgtgacctcctcccagaccgtgtcccacggtgtcaacgagactatctacaacaccaccctgaagtacggcgacgtcgtgggtgtcaacaccaccaagtacccctaccgtgtgtgctccatggctcagggcaccgacctgatccgtttcgagcgtaacatcgtgtgcacctccatgaagcccatcaacgaggacctggacgagggtatcatggtggtgtacaagcgcaacatcgtggctcacaccttcaaggtccgcgtgtaccagaaggtgctgaccttccgtcgttcctacgcttacatccacaccacttacctgctgggttccaacaccgagtacgtggcccctcccatgtgggagatccaccacatcaactcccactcccagtgctactcctcttactcccgtgtgatcgctggcaccgtgttcgtggcttaccaccgtgactcctacgagaacaagaccatgcagctgatgcccgacgactactccaacacccactccacccgttacgtgaccgtgaaggaccagtggcactcccgtggttccacctggctgtaccgtgaaacctgcaacctgaactgcatggtcaccatcaccaccgctcgttccaagtacccttaccacttcttcgctacctccaccggcgacgtggtggacatctcccccttctacaacggtactaaccgtaacgcttcctacttcggcgagaacgctgacaagttcttcatcttccccaactacaccatcgtgtccgacttcggtcgtcccaactccgctctggaaacccaccgtctggtggctttcttggagcgtgctgactccgtgatctcctgggacatccaggacgagaagaacgtgacctgccagctgaccttctgggaggcttccgagcgtaccatccgttccgaggctgaggactcctaccacttctccagcgctaagatgaccgctaccttcctgtccaagaaacaagaggtcaacatgtccgactccgccctggactgcgtgcgtgacgaggctatcaacaagctgcagcagatcttcaacacctcctacaaccagacctacgagaagtacggaaacgtgtccgtgttcgagactaccggtggcctggtggtgttctggcagggtatcaagcagaagtccctggtcgagctggaacgtctggctaaccgttcctccctgaacctgacccacaaccgtaccaagcgttccaccgacggcaacaacgctactcacctgtccaacatggaatccgtgcacaacctggtgtacgctcagctgcagttcacctacgacaccctgcgcggttacatcaaccgtgctctggctcagatcgctgaggcttggtgcgtggaccagcgtcgtaccctggaagtgttcaaggaactgtccaagatcaacccctccgctatcctgtccgccatctacaacaagcctatcgctgctcgtttcatgggcgacgtgctgggcctggcttcctgcgtgaccatcaaccagacttccgtgaaggtgctgcgtgacatgaacgtgaaggaatcccccggtcgttgctactcccgtcccgtggtcatcttcaacttcgctaactcctcctacgtgcagtacggccagctgggcgaggacaacgagatcctgctgggcaaccaccgtaccgaggaatgccagctgccctccctgaagatcttcatcgctggcaactccgcttacgaatacgtggactacctgttcaagcgcatgatcgacctgtcctccatctctaccgtggactccatgatcgctctggacatcgaccccctggaaaacaccgacttccgtgtgctggaactgtactcccagaaggaactgcgttccatcaacgtgttcgacctggaagagatcatgcgcgagttcaactcctacaagcagcgtgttaagtacgtcgaggacaaggtggtggaccccctgcccccctacctgaagggactggacgacctgatgtccggcctgggagctgccggcaaggctgtgggtgtcgctatcggtgctgtgggtggtgctgtggcttccgtggtcgagggtgtcgccaccttcctgaagaaccccttcggtgctttcaccatcatcctggtggctatcgctgtggtcatcatcatctacctgatctacacccgtcagcgtcgtctgtgcatgcagcccctgcagaacctgttcccctacctggtgtccgctgacggtactaccgtgacctccggcaacaccaaggacacctccctgcaggctcccccatcctacgaggaatccgtctacaactccggtcgcaagggtcccggtcccccttcctccgacgcttctaccgctgctcccccatacaccaacgagcaggcttaccagatgctgctggctctcgtgcgtctggacgctgagcagcgtgcacagcagaacggcaccgactccctggacggccagaccggaacccaggacaagggccagaagcccaacctgctggaccgtctgcgtcaccgcaagaacggttaccgtcacctgaaggactccgacgaggaagagaacgtctaaggcgcgccaagcttgtcgagaagtactagagatcataatcagccataccacatttgtagaggttttacttgctttaaaaaacctcccacacctccccctgaacctgaaacataaaatgaatgcaattgttgttgttaacttgtttattgcagcttataatggttacaaataaagcaatagcatcacaaatttcacaaataaagcatttttttcactgcattctagttgtggtttgtccaaactcatcaatgtatcttatcatgtctggatctgatcactgcttgagcctagaagatccggctgctaacaaagcccgaaaggaagctgggaatattaatagatcatggagataattaaaatgataaccatctcgcaaataaataagtattttactgttttcgtaacagttttgtaataaaaaaacctataaatattccggattattcataccgtcccaccatcgggcgcggatccgccaccatgcgtcccggcctgccctcctacctgatcgtgctggctgtgtgcctgctgtcccacctcctgtcctcccgttacggtgctgaggctatctccgagcccctggacaaggctttccacctcctgctgaacacctacggtcgtcctatccgtttcctgcgcgagaacaccacccagtgcacctacaactcctccctgcgcaactccaccgtcgtccgcgagaacgctatctccttcaacttcttccagtcctacaaccagtactacgtgttccacatgccccgttgcctgttcgctggtcccctggctgagcagttcctgaaccaggtggacctgaccgagactctcgagcgttaccagcagcgtctgaacacttacgctctggtgtccaaggacctggcttcctaccgttccttcagccagcagctgaaggctcaggactccctgggcgagcagcccaccactgtgcctccccctatcgacctgtccatcccccacgtgtggatgcccccccagaccactcctcacggctggaccgagtcccacaccacctccggactgcaccgtccccacttcaaccagacctgcatcctgttcgacggtcacgacctgctgttctccaccgtgaccccctgcctgcaccagggcttctacctcatcgacgagctgcgttacgtgaagatcaccctgaccgaggatttcttcgtggtcaccgtgtccatcgacgacgacacccccatgctgctgatcttcggtcacctcccccgtgtgctgttcaaggctccctaccagcgtgacaacttcatcctgcgtcagaccgagaagcacgagctgctggtgctggtcaagaaggaccagctgaaccgtcactcttacctgaaggaccccgacttcctggacgctgctctggacttcaactacctggacctgtccgctctgctgaggaactccttccaccgttacgctgtggacgtgctgaagtccggtcgttgccagatgctggaccgtcgtaccgtcgagatggctttcgcttacgccctggctctgttcgctgctgctcgtcaagaagaggctggcgctcaggtgtccgtgccccgtgctctggaccgtcaggctgctctgctgcagatccaagagttcatgatcacttgcctgtcccagaccccccctcgtaccaccctgctgctgtaccccaccgctgtggacctggctaagcgtgctctgtggacccccaaccagatcaccgacatcacctccctcgtgcgtctggtgtacatcctgtccaagcagaaccagcagcacctgatcccccagtgggctctgcgtcagatcgctgacttcgctctgaagctgcacaagacccacctggcttcattcctcagcgctttcgctcgccaagagctgtacctgatgggttccctggtgcactccatgctggtgcacaccaccgagcgtcgcgagatcttcatcgtggaaaccggcctgtgctccctggccgagctgtcccacttcacccagctgctggctcacccccaccacgagtacctgtccgacctgtacaccccctgctcctcttccggtcgtcgtgaccactccctggaacgtctgacccgtctgttccccgacgctaccgtgcctaccaccgtgcctgctgctctgtccatcctgtctaccatgcagccctccaccctggaaaccttccccgacctgttctgcctgcctctgggcgagtccttctccgctctgaccgtgtccgagcacgtgtcctacgtggtcaccaaccagtacctgatcaagggcatctcctaccccgtgtccaccaccgtcgtgggccagtccctgatcatcacccagaccgactcccagaccaagtgcgagctgacccgtaacatgcacaccactcactccatcaccgctgctctgaacatctccctcgagaactgcgctttctgccagtccgctctgttggagtacgacgacactcagggtgtcatcaacatcatgtacatgcacgactccgacgacgtgctgttcgctctggacccctacaacgaggtggtggtgtcctccccccgtacccactacctgatgctgctgaagaacggcaccgtgctggaagtgaccgacgtggtggtggacgctaccgaccgtctgctgatgatgtccgtgtacgctctgtccgctatcatcggcatctacctgctgtaccgtatgctgaagacctgctaaggcgccaagctttgtcgagaagtactagaggatcataatcagccataccacatttgtagaggttttacttgctttaaaaaacctcccacacctccccctgaacctgaaacataaaatgaatgcaattgttgttgttaacttgtttattgcagcttataatggttacaaataaagcaatagcatcacaaatttcacaaataaagcatttttttcactgcattctagttgtggtttgtccaaactcatcaatgtatcttatcatgtctggatctgatcactgcttgagcctagaagatccggctgctaacaaagcccgaaaggaagctgagttggctgctgctgagtagtgcgcgagcaaaatttaagctacaacaaggcacgcgtccggaatattaatagatcatggagataattaaaatgataaccatctcgcaaataaataagtattttactgttttcgtaacagttttgtaataaaaaaacctataaatattccggattattcataccgtcccaccatcgggcgcggatcccggtccgaagcgcgcggaattcaaaggcctacgtcgacgccaccatggaatcccgtggtcgtcgttgccccgagatgatctccgtgctgggtcccatctccggtcacgtcctgaaggctgtgttctcccgtggcgacacccccgtgctgccccacgaaactcgtctgctgcagaccggtatccacgtgcgtgtgtcccagccctccctgatcctggtgtcccagtacacccccgactccaccccttgccaccgcggagacaaccagctgcaggtccagcacacctacttcaccggttccgaggtcgagaacgtgtccgtgaacgtgcacaaccccaccggtcgttccatctgcccctcccaagagcccatgtccatctacgtgtacgctctgcccctgaagatgctgaacatcccctccatcaacgtgcaccactacccctccgctgctgagcgcaagcaccgtcacctccccgtggctgacgctgtgatccacgcttccggcaagcagatgtggcaggctcgtctgaccgtgtccggcctggcttggacccgtcagcagaaccagtggaaggaacccgacgtgtactacacctccgctttcgtgttccccaccaaggacgtggccctgcgtcacgtcgtgtgcgctcacgaactcgtgtgctccatggaaaacacccgtgctaccaagatgcaagtgatcggcgaccagtacgtgaaggtgtacctggaatccttctgcgaggacgtgccctccggcaagctgttcatgcacgtgaccctgggttccgacgtggaagaggacctgaccatgacccgtaacccccagcccttcatgcgtccccacgagcgtaacggtttcaccgtgctgtgccccaagaacatgatcatcaagcccggcaagatctcccacatcatgctggacgtggccttcacctcccacgagcacttcggcctgctgtgccctaagtccatccccggcctgtccatctccggcaacctgctgatgaacggccagcagatcttcctggaagtgcaggctatccgtgaaaccgtcgagctgcgtcagtacgaccctgtggctgctctgttcttcttcgacatcgacctgctgctgcagcgtggtccccagtactccgagcaccccaccttcaccagccagtaccgtatccagggcaagctggaataccgtcacacctgggaccgtcacgacgagggtgctgctcagggcgacgacgacgtgtggacctccggttccgactccgacgaggaactggtcaccaccgagcgcaagaccccccgtgtgaccggtggtggtgctatggctggtgcttccacctccgctggtcgcaagcgcaagtccgcttcctccgctaccgcttgcaccgctggtgtcatgacccgtggtcgcctgaaggctgagtccaccgtggctcccgaagaggacactgacgaggactccgacaacgagatccacaaccccgctgtgttcacctggcccccctggcaggctggtatcctggctcgtaacctggtgcccatggtggctaccgtgcagggccagaacctgaagtaccaagagttcttctgggacgccaacgacatctaccgtatcttcgctgagctggaaggcgtgtggcagcccgctgctcagcccaagcgtcgtcgtcaccgtcaggacgctctgcctggtccctgtatcgcttccacccccaagaagcaccgcggctaaaagcttgtcgagaagtactagaggatcataatcagccataccacatttgtagaggttttacttgctttaaaaaacctcccacacctccccctgaacctgaaacataaaatgaatgcaattgttgttgttaacttgtttattgcagcttataatggttacaaataaagcaatagcatcacaaatttcacaaataaagcatttttttcactgcattctagttgtggtttgtccaaactcatcaatgtatcttatcatgtctggatctgatcactgcttgagcctagaagatccggctgctaacaaagcccgaaaggaagctgagttggctgctgccaccgctgagcaataactatcataacccctaggagatccgaaccagataagtgaaatctagttccaaactattttgtcatttttaattttcgtattagcttacgacgctacacccagttcccatctattttgtcactcttccctaaataatccttaaaaactccatttccacccctcccagttcccaactattttgtccgcccaca

SEQ ID NO: 58 - DNA, 27348 bp, Artificial Sequence
  Synthetic construct
ttgttccagtttggaacaagagtccactattaaagaacgtggactccaacgtcaaagggcgaaaaaccgtctatcagggcgatggcccactacgtgaaccatcaccctaatcaagttttttggggtcgaggtgccgtaaagcactaaatcggaaccctaaagggagcccccgatttagagcttgacggggaaagccggcgaacgtggcgagaaaggaagggaagaaagcgaaaggagcgggcgctagggcgctggcaagtgtagcggtcacgctgcgcgtaaccaccacacccgccgcgcttaatgcgccgctacagggcgcgtccattcgccattcaggctgcgcaactgttgggaagggcgatcggtgcgggcctcttcgctattacgccagctggcgaaagggggatgtgctgcaaggcgattaagttgggtaacgccagggttttcccagtcacgacgttgtaaaacgacggccagtgcatagaccagccgcgtaacctggcaaaatcggttacggttgagtaataaatggatgccctgcgtaagcgggtgtgggcggacaataaagtcttaaactgaacaaaatagatctaaactatgacaataaagtcttaaactagacagaatagttgtaaactgaaatcagtccagttatgctgtgaaaaagcatactggacttttgttatggctaaagcaaactcttcattttctgaagtgcaaattgcccgtcgtattaaagaggggcgtggccaagggcatggtaaagactatattcgcggcgttgtgacaatttaccgaacaactccgcggccgggaagccgatctcggcttgaacgaattgttaggtggcggtacttgggtcgatatcaaagtgcatcacttcttcccgtatgcccaactttgtatagagagccactgcgggatcgtcaccgtaatctgcttgcacgtagatcacataagcaccaagcgcgttggcctcatgcttgaggagattgatgagcgcggtggcaatgccctgcctccggtgctcgccggagactgcgagatcatagatatagatctcactacgcggctgctcaaacttgggcagaacgtaagccgcgagagcgccaacaaccgcttcttggtcgaaggcagcaagcgcgatgaatgtcttactacggagcaagttcccgaggtaatcggagtccggctgatgttgggagtaggtggctacgtctccgaactcacgaccgaaaagatcaagagcagcccgcatggatttgacttggtcagggccgagcctacatgtgcgaatgatgcccatacttgagccacctaactttgttttagggcgactgccctgctgcgtaacatcgttgctgctgcgtaacatcgttgctgctccataacatcaaacatcgacccacggcgtaacgcgcttgctgcttggatgcccgaggcatagactgtacaaaaaaacagtcataacaagccatgaaaaccgccactgcgccgttaccaccgctgcgttcggtcaaggttctggaccagttgcgtgagcgcatacgctacttgcattacagtttacgaaccgaacaggcttatgtcaactgggtttgtgccttcatccgtttccacggtgtgcgtcacccggcaaccttgggcagcagcgaagtcgaggcatttctgtcctggctggcgaacgagcgcaaggtttcggtctccacgcatcgtcaggcattggcggccttgctgttcttctacggcaaggtgctgtgcacggatctgcccttgcttcaggagatcggtagacctcggccgtcgcggcgcttgccggtggtgctgaccccggatgaagtggttcgcatcctcggttttctggaaggcgagcatcgtttgttcgcccaggactctagctatagttctagtggttggctacagctttgtttgtactatcaacaggttgaactgctgatcaacagatcctctacgcggccgcggtaccataacttcgtatagcatacattatacgaagttatctggtttaaacgtacccgtagtggctatggcagggcttgccgccccgacgttggctgcgagccctgggccttcacccgaacttgggggttggggtggggaaaaggaagaaacgcgggcgtattggtcccaatggggtctcggtggggtatcgacagagtgccagccctgggaccgaaccccgcgtttatgaacaaacgacccaacacccgtgcgttttattctgtctttttattgccgtcatagcgcgggttccttccggtattgtctccttccgtgtttcagttagcctcccccatctcccggtaccgcatgctatgcatcagctgctagcaccatggctcgagatcccgggtgatcaagtcttcgtcgagtgattgtaaataaaatgtaatttacagtatagtattttaattaatatacaaatgatttgataataattcttatttaactataatatattgtgttgggttgaattaaaggtccgtatactagtatcgattcgcgacctactccggaatattaatagatcatggagataattaaaatgataaccatctcgcaaataaataagtattttactgttttcgtaacagttttgtaataaaaaaacctataaatattccggattattcataccgtcccaccatcgggcgcggatccgccaccatggaaaactggtccgctctggaactgctgcccaaggtcggaatccctaccgacttcctgacccacgtcaagacctccgctggcgaggaaatgttcgaggctctgaggatctactacggcgacgaccccgagcgttacaacatccacttcgaggctatcttcggcaccttctgcaaccgtctggaatgggtgtacttcctgacttccggcctggctgctgctgctcacgctatcaagttccacgacctgaacaagctgaccaccggcaagatgctgttccacgtgcaagtgccccgtgtggcttccggtgctggcctgcctacctcccgtcagaccaccatcatggtcaccaagtactccgagaagtcccccatcaccatccctttcgagctgtccgctgcttgcctgacttacctgcgtgaaaccttcgagggcaccatcctggacaagatcctgaacgtcgaggctatgcacaccgtgctgcgtgctctgaagaacaccgctgacgctatggaacgtggcctgatccacagcttcctccagaccctgctgaggaaggctcccccctacttcgtggtgcagaccctggtcgagaacgctaccctggctcgtcaggctctgaaccgtatccagcgctccaacatcctgcagtccttcaaggctaagatgctggctaccctgttcctgctgaaccgtacccgtgaccgtgactacgtgctgaagttcctgacccgtctggctgaggctgctaccgactccatcctcgacaaccctactacctacaccacctcctccggtgctaagatctccggtgtcatggtgtccaccgctaacgtgatgcagatcatcatgtccctgctgtcctcccacatcactaaggaaaccgtgtccgctcccgctacctacggcaacttcgtgctgtcccccgagaacgctgtgaccgctatctcctaccactctatcctggctgacttcaactcctacaaggctcacctgacctccggccagccccacctccccaacgactccctgagccaggctggtgctcactccctgacccccctgtccatggacgtgatccgtctgggcgaaaagaccgtgatcatggaaaacctgcgtcgcgtgtacaagaacaccgacaccaaggaccccctggaacgtaacgtggacctgaccttcttcttccccgtgggcctgtacctgcccgaggaccgtggttacaccaccgtcgagtccaaggtcaagctgaacgacaccgtgcgtaacgctctgcccaccaccgcttacctgctgaacagggaccgtgctgtgcaaaagatcgacttcgtggacgctctcaagaccctgtgccaccccgtgctgcacgagcctgctccatgcctgcaggctttcaccgagcgtggtcccccatccgagcccgctatgcagcgtctgctggaatgccgtttccagcaagagcccatgggtggtgctgctcgtcgtatcccccacttctaccgtgtgcgccgcgaggtgccccgtaccgtgaacgagatgaagcaggacttcgtggtcaccgacttctacaaggttggaaacatcaccctgtacaccgagctgcaccctttcttcgacttcacccactgccaagagaactccgagactgtggctctgtgcaccccccgtatcgtgatcggcaacctgcccgacggcctggctcccggtcccttccacgagctgaggacctgggagatcatggaacacatgcgcctgcgtcccccacccgactacgaggaaaccctgcgtctgttcaagaccaccgtgacctcccccaactaccccgagctgtgctacctggtggacgtgctggtgcacggcaacgctgacgctttcctgctgatccgcgctttcatcgctcgttgcatcgtgaacatgttccacacccgtcagctgctggtgttcgctcactcctacgctctggtcaccctgatcgctgagcacctggctgacggtgctctgcccccccagctcctgttccactaccgtaacctggtggctgtgctgcgcctggtcacccgtatctccgctctgcccggcctgaacaacggccagctggctgaggaacccctgtccgcttacgtgaacgctctgcacgaccacaggctgtggccccccttcgtgacccacctccctcgtaacatggaaggtgtccaggtggtggctgatcgtcagcccctgaaccccgctaacatcgaggctcgtcaccacggtgtctccgacgtgccccgtctgggtgctatggacgctgacgagcccctgttcgtggacgactaccgtgctaccgacgacgagtggaccctgcaaaaggtgttctacctgtgcctgatccccgctatgaccaacaaccgtgcttgcggcctgggcctgaacctcaagactctgctggtggacctgttctaccgtcccgccttcctgctcatgcccgctgctaccgctgtgtccacctccggcaccacctccaaggaatccacctctggtgtcacccccgaggactccgtggctgctcagcgtcaggctgtgggcgagatgctgaccgagctggtcgaggacgtggccaccgacgctcacacccctctgctgcaggcttgccgcgagctgttcctggctgtgcagttcgtgggcgagcacgtgaaggtgctggaagtgcgtgctcccctggaccacgctcagaggcagggactgcccgacttcatctcccgtcagcatgtgctgtacaacggttgctgcgtcgtgaccgctcctaagaccctgatcgagtactccctgcccgtgcccttccaccgtttctactccaaccccaccatctgcgctgctctgtccgacgacatcaagcgttacgtgaccgagttcccccactaccatagacacgatggtggtttccccctgcccaccgctttcgctcacgagtaccacaactggctgcgtagccccttctcccgttactccgctacctgccccaacgtgctgcactccgtgatgaccctggctgctatgctgtacaagatctcccccgtgtccctggtgctgcagaccaaggctcacatccaccccggtttcgctctgaccgctgtgcgtaccgacaccttcgaggtggacatgctgctgtactccggcaagtcctgcacctccgtcatcatcaacaaccccatcgtgaccaaggaagagagggacatctccaccacctaccacgtgacccagaacatcaacaccgtggacatgggcctgggttacacctccaacacttgcgtggcctacgtgaaccgcgtccgcaccgacatgggtgtccgtgtgcaggacctgttccgtgtgttccccatgaacgtgtaccgccacgatgaggtggaccgttggatcaggcacgctgctggcgtcgagcgtccccagctgctggacaccgagactatctccatgctgaccttcggttccatgtccgagcgcaacgctgctgctaccgtgcacggccagaaggctgtctgcgagctgatcctgacccctgtgactatggacgtgaactacttcaagatcaccaacaaccctcgtggtcgtgcttcctgcatgctgggcgtggacccctacgacaccgaggctgccaccaaggctatctacgaccaccgcgaggctgacgctcagaccttcgctgctacccacaacccatgggcttcccaggctggttgcctgtccgacgtcctgtacaacacccgtcaccgcgagcgtctgggctacaactccaagttctactccccctgcgctcagtacttcaacaccgaggaaatcatcgctgccaacaagaccctcttcaagaccatcgacgagtacctgctgcgcgctaaggactgcatccgtggcgacaccgacactcagtacgtgtgcgtcgagggaaccgagcagctgatcgagaacccttgccgtctgacccaagaggctctgcccatcctgtccaccaccaccctggctctgatggaaactaagctgaagggtggcgctggtgctttcgctacctccgagactcacttcggcaactacgtcgtgggagagatcatccccctgcagcagtccatgctgttcaacagctaagagctcaagcttgtcgagaagtactagaggatcataatcagccataccacatttgtagaggttttacttgctttaaaaaacctcccacacctccccctgaacctgaaacataaaatgaatgcaattgttgttgttaacttgtttattgcagcttataatggttacaaataaagcaatagcatcacaaatttcacaaataaagcatttttttcactgcattctagttgtggtttgtccaaactcatcaatgtatcttatcatgtctggatctgatcactgcttgagcctagaagatccggctgctaacaaagcccgaaaggaagctgagttggctgctgcccaccgctgagcaataactatcataacccccggaatattaatagatcatggagataattaaaatgataaccatctcgcaaataaataagtattttactgttttcgtaacagttttgtaataaaaaaacctataaatattccggattattcataccgtcccaccatcgggcgcggatccgccaccatggctgctatggaagctaacatcttctgcaccttcgaccacaagctgtctatcgctgacgtgggcaagctgaccaagctggtggctgctgtggtgcccatcccccagcgtctgcacctgatcaagcactaccagctgggcctgcaccagttcgtggaccacacccgtggttacgtgcgtctgcgtggcctgctgcgtaacatgaccctgaccctgatgcgtcgtgtcgagggcaaccagatcctgctgcacgtgcccacccacggcctgctgtacaccgtgctgaacaccggtcccgtgacctgggagaagggcgacgctctgtgcgtgctgccccccctgttccacggtcccctggctcgtgaaaacctgttgaccctgggccagtgggagctggtgctgccctggatcgtgcccatgcccctggctctggaaatcaaccagcgcctgctgatcatgggcctgttctccctggaccgttcctacgaagaagtgaaggctgctgtccagcagctgcagaccatcaccttccgtgacgctaccttcaccatccccgaccccgtgatcgaccagcacctcctgatcgacatgaagaccgcttgcctgtccatgtccatggtggctaacctggcttccgagctgaccatgacctacgtccgcaagctggctttggaggactcttccatgctgctggtcaagtgccaagagctgctgatgcgtctggaccgcgagcgttccgtgggcgagcctcgtactcccgctcgtcctcagcacgtgtcccccgacgacgagatcgctcgtctgtccgctctgttcgtgatgctgcgtcagctggacgacctgatccgcgagcaggtcgtgttcaccgtgtgcgacgtgagcccagacaacaagtccgctacctgcatcttcaagggctaaggcgcgccaagcttgtcgagaagtactagaggatcataatcagccataccacatttgtagaggttttacttgctttaaaaaacctcccacacctccccctgaacctgaaacataaaatgaatgcaattgttgttgttaacttgtttattgcagcttataatggttacaaataaagcaatagcatcacaaatttcacaaataaagcatttttttcactgcattctagttgtggtttgtccaaactcatcaatgtatcttatcatgtctggatctgatcactgcttgagcctagaagatccggctgctaacaaagcccgaaaggaagctgagttggctgctgccaccgctgagcaataactatcataacccccggaatattaatagatcatggagataattaaaatgataaccatctcgcaaataaataagtattttactgttttcgtaacagttttgtaataaaaaaacctataaatattccggattattcataccgtcccaccatcgggcgcggatcccggtccgaagcgcgcggaattcaaaggcctgccaccatggaaatgaacaaggtgctgcatcaggatctggtgcaggctacccgtcgtatcctgaagctgggcccctccgagctgcgtgtgaccgacgctggcctgatctgcaagaaccccaactactccgtgtgcgacgctatgctcaagaccgacaccgtgtactgcgtcgagtacctgctgtcctactgggagtcccgtaccgaccacgtgccctgcttcatcttcaagaacaccggttgcgctgtgtccctgtgctgcttcgtgcgtgctcccgtgaagctggtgtcccctgctcgtcacgtgggcgagttcaacgtgctgaaggtcaacgagtccctgatcgtgaccctgaaggacatcgaggaaatcaagccctccgcttacggtgtcctgactaagtgcgtcgtccgcaagtccaactccgcttccgtgttcaacatcgagctgatcgctttcggtcccgagaacgagggcgagtacgagaacctgctgcgcgagctgtacgctaagaaggctgcttccacctccctggctgtgcgtaaccacgtgaccgtgtcctcccactccggttccggtccctccctgtggcgtgctcgtatgtccgctgctctgacccgtaccgctggcaagcgctcctccaggactgctagccctccaccaccacctcctcgtcaccctagctgctctcccactatggtggctgctggtggagctgctgctggtcctagacctccccctcctcctatggctgctggatcctggcgtctgtgccgttgcgaggcttgcatgggccgttgcggttgcgcttccgagggcgacgctgacgaggaagaggaagagttgctggctctggctggcgagggcaaggctgctgctgccgctgccggtcaagacgtcggtggttccgctcgtcgtcccctcgaggaacacgtgtcccgtcgtcgtggtgtctccacccaccaccgtcaccccccttccccaccttgcgctccctccctggaacgtaccggttaccgttgggctccttcctcctggtggcgcgctcgttctggtccttcccgtccccagtccggtccctggctgcctgctcgtttcgctaccctgggtcccctggtcctggctctgctgttggtgctggccctgctgtggcgtggtcacggtcaatcccccagccccacccgttccgctcaccgtgactaaaagcttgtcgagaagtactagaggatcataatcagccataccacatttgtagaggttttacttgctttaaaaaacctcccacacctccccctgaacctgaaacataaaatgaatgcaattgttgttgttaacttgtttattgcagcttataatggttacaaataaagcaatagcatcacaaatttcacaaataaagcatttttttcactgcattctagttgtggtttgtccaaactcatcaatgtatcttatcatgtctggatctgatcactgcttgagcctagaagatccggctgctaacaaagcccgaaaggaagctgagttggctgctgtggctagctttgtttaactttaagaaggagatacatctagaaatattaatagatcatggagataattaaaatgataaccatctcgcaaataaataagtattttactgttttcgtaacagttttgtaataaaaaaacctataaatattccggattattcataccgtcccaccatcgggcgcggatcccggtccgaagcgcgcggaattcaaaggcctacgtcgacgccaccatgtccaacaccgctcccggtcccaccgtggctaacaagcgtgacgagaagcaccgtcacgtggtcaacgtggtgctcgagctgcccaccgagatctccgaggctacccaccccgtgctggctaccatgctgtccaagtacacccgtatgtcctccctgttcaacgacaagtgcgctttcaagctggacctgctgcgtatggtggctgtgtcccgtacccgtcgctaaaagcttgtcgagaagtactagaggatcataatcagccataccacatttgtagaggttttacttgctttaaaaaacctcccacacctccccctgaacctgaaacataaaatgaatgcaattgttgttgttaacttgtttattgcagcttataatggttacaaataaagcaatagcatcacaaatttcacaaataaagcatttttttcactgcattctagttgtggtttgtccaaactcatcaatgtatcttatcatgtctggatctgatcactgcttgagcctagaagatccggctgctaacaaagcccgaaaggaagctgagttggctgctgggtgcctaatgagtgagctaactcacattaattgcccggaatattaatagatcatggagataattaaaatgataaccatctcgcaaataaataagtattttactgttttcgtaacagttttgtaataaaaaaacctataaatattccggattattcataccgtcccaccatcgggcgcggatcccggtccgaagcgcgcggaattcgccaccatggacgctcgtgctgtggctaagcgtccccgtgaccccgctgacgaggacaacgagctggtcaccgctctgaaggctaagcgtgaagtgaacaccatctccgtgcgttacctgtaccacgctgaccaccaggctctgaccgctcgtttcttcgtgcccgagggcctggtcgagttcgaggctcagcccggtgctctgctgatccgtatggaaaccggttgcgactccccccgtcacctgtacatctccctgtacctgctgggtatccgtgcttccaacgtgtccgcttccacccgttgcctgctcgagtccgtgtacaccgcttccgctgctcgtgctgctctgcagtggctggacctgggtccccacctcctgcaccgtcgtctggaaaccctgggttgcgtcaagaccgtgtccctgggtatcacctccctgctgacctgcgtgatgcgcggctacctgtacaacaccctcaagaccgaggtgttcgctctgatgatccccaaggacatgtacctgacctgggaggaaacccgcggtcgtctgcagtacgtgtacctgatcatcgtgtacgactacgacggtcccgagactcgtcccggtatctacgtgctgacctcctctatcgctcactggcagaccctggtggacgtggcccgtggaaagttcgctcgtgaacgctgctccttcgtgaaccgtcgtatcacccgtccccgtcagatccccctgtgcaccggtgtcatccaaaagctgggctggtgcctggctgacgacatccacacctcattcctcgtgcacaaggaactgaagctgtccgtcgtgcgtctggacaacttctccgtcgagctgggcgacttccgcgagttcgtgtaaaagcttgtcgagaagtactagaggatcataatcagccataccacatttgtagaggttttacttgctttaaaaaacctcccacacctccccctgaacctgaaacataaaatgaatgcaattgttgttgttaacttgtttattgcagcttataatggttacaaataaagcaatagcatcacaaatttcacaaataaagcatttttttcactgcattctagttgtggtttgtccaaactcatcaatgtatcttatcatgtctggatctgatcactgcttgagcctagaagatccggctgctaacaaagcccgaaaggaagctgagttggctgctgccaccgctgagcaataactatcataacccctaggggcctctaaacgggtcttgaggggttttttgctgaaaggaggaactatatccggatctgaacaggagggacagctgatagaaacagaagccactggagcacctcaaaaacaccatcatacactaaatcagtaagttggcagcatcacccgacgcactttgcgccgaataaatacctgtgacggaagatcacttcgcagaataaataaatcctggtgtccctgttgataccgggaagccctgggccaacttttggcgaaaatgagacgttgatcggcacgtaagaggttccaactttcaccataatgaaataagatcactaccgggcgtattttttgagttatcgagattttcaggagctaaggaagctaaaatggagaaaaaaatcactggatataccaccgttgatatatcccaatggcatcgtaaagaacattttgaggcatttcagtcagttgctcaatgtacctataaccagaccgttcagctggatattacggcctttttaaagaccgtaaagaaaaataagcacaagttttatccggcctttattcacattcttgcccgcctgatgaatgctcatccggaattccgtatggcaatgaaagacggtgagctggtgatatgggatagtgttcacccttgttacaccgttttccatgagcaaactgaaacgttttcatcgctctggagtgaataccacgacgatttccggcagtttctacacatatattcgcaagatgtggcgtgttacggtgaaaacctggcctatttccctaaagggtttattgagaatatgtttttcgtctcagccaatccctgggtgagtttcaccagttttgatttaaacgtggccaatatggacaacttcttcgcccccgttttcaccatgggcaaatattatacgcaaggcgacaaggtgctgatgccgctggcgattcaggttcatcatgccgtttgtgatggcttccatgtcggcagaatgcttaatgaattacaacagtactgcgatgagtggcagggcggggcgtaatttttttaaggcagttattggtgcccttaaacgcctggttgctacgcctgaataagtgataataagcggatgaatggcagaaattcgaaagcaaattcgacccggtcgtcggttcagggcagggtcgttaaatagccgcttatgtctattgctggtttaccggtttattgactaccggaagcagtgtgaccgtgtgcttctcaaatgcctgaggccagtttgctcaggctctccccgtggaggtaataattgacgatatgatcatttattctgcctcccagctgacattcatccggggtcagcaccgtttctgcggactggctttctacgtgttccgcttcctttagcagcccttgcgccctgagtgcttgcggcagcgtgaagctaattctgtcagccgttaagtgttcctgtgtcactcaaaattgctttgagaggctctaagggcttctcagtgcgttacatccctggcttgttgtccacaaccgttaaaccttaaaagctttaaaagccttatatattcttttttttcttataaaacttaaaaccttagaggctatttaagttgctgatttatattaattttattgttcaaacatgagagcttagtacgtgaaacatgagagcttagtacgttagccatgagagcttagtacgttagccatgagggtttagttcgttaaacatgagagcttagtacgttaaacatgagagcttagtacgtgaaacatgagagcttagtacgtactatcaacaggttgaactgctgatcaacagatcctctacgcggccgcggtaccataacttcgtatagcatacattatacgaagttatctggtttaaacgtacccgtagtggctatggcagggcttgccgccccgacgttggctgcgagccctgggccttcacccgaacttgggggttggggtggggaaaaggaagaaacgcgggcgtattggtcccaatggggtctcggtggggtatcgacagagtgccagccctgggaccgaaccccgcgtttatgaacaaacgacccaacacccgtgcgttttattctgtctttttattgccgtcatagcgcgggttccttccggtattgtctccttccgtgtttcagttagcctcccccatctcccggtaccgcatgctatgcatcagctgctagcttagcgagcgtccacagcctggggaccgtaacgggagtgagcgggcaggttcacacgggtctgcttcagctcagggggcaggccagcgtagtacttgtccaggtgacgcagcaggggggggtccagctggtgacgcaggcagaattccttcacagcgttgtacaggccgtagaacagggtgataccctcgggagcagcagcggtggacacgggcagacgcacagcacggttggtacgggtagcctcgttacggatagccaccaccacgttgaacagggaggggggcaccagctcgaaacccagcacgtgttcggtgaagatggaacgaccgtaggacagacgagtcaggtcgtaaccacggcacaggtcgtccacgcaagtgtacacagcgggggaaccgtcgccgcactcggagtaaccgcgcatcacggtcatccaacggggagcggtgtcggaggacagcagggtcagcagagcacgcagctggtcggggttgttgtacagcagggccagggtgtccaggaaagcgtcgtccagcagcacggagttagcagcctcgggggtcacgggacggtaacggatcagctgggacaggggaccgtccctacgggtcacgttgaccaggggacgcagccaggactcgtacttgtcgccctggaacacctctcccagcaggcaacgacgggtcagctcggggcactcagcgggcaccttctcagccacggtgggagccacggacacggtagcggaggacacgatgggcagcagcaggcagcaccacagcagagccacgggaccgggggagaaggagaaaccgcagtcgggacgacggcacatggtggctcgagatcccgggtgatcaagtcttcgtcgagtgattgtaaataaaatgtaatttacagtatagtattttaattaatatacaaatgatttgataataattcttatttaactataatatattgtgttgggttgaattaaaggtccgtatactagtatcgattcgcgacctactccggaatattaatagatcatggagataattaaaatgataaccatctcgcaaataaataagtattttactgttttcgtaacagttttgtaataaaaaaacctataaatattccggattattcataccgtcccaccatcgggcgcggatccgccaccatgaactccaaggacctgacccccttcctgaccaccctgtggctgctgctggaccactcccgtgtgcctcgtgtgcgtgctgaggaatgctgcgaagtgatcaacgtgaaccacccccccgagcgctgctacgacttcaagatgtgcaacctgttcaccgtggctctgcgttgccccgacggcgaagtgtgctactcccccgaaaagaccgctgagatccgtggtatcgtgaccaccatgacccactccctgacccgtcaagtgatccacaacaagctgaccagctgcaactacaaccccctgtacctcgaggctgacggtcgtatccgttgcggcaaggtgtccgacaaggctcagtacctgctgggtgctgctggttccgtgccctaccgttggatcaacctcgagtacgacaagatcacccgtatcgtgggcctggaccagtacctcgagtccgtgaagaagcacaagcgtctggacgtgtgccgtgctaagatgggttacatgctgcagtaaaagcttgtcgagaagtactagaggatcataatcagccataccacatttgtagaggttttacttgctttaaaaaacctcccacacctccccctgaacctgaaacataaaatgaatgcaattgttgttgttaacttgtttattgcagcttataatggttacaaataaagcaatagcatcacaaatttcacaaataaagcatttttttcactgcattctagttgtggtttgtccaaactcatcaatgtatcttatcatgtctggatctgatcactgcttgagcctagaagatccggctgctaacaaagcccgaaaggaagctgagttggctgctgtggctagctttgtttaactttaagaaggagatacatctagaccggaatattaatagatcatggagataattaaaatgataaccatctcgcaaataaataagtattttactgttttcgtaacagttttgtaataaaaaaacctataaatattccggattattcataccgtcccaccatcgggcgcggatccgccaccatgctgcgtctgctgctgcgtcaccacttccactgcctgctgctgtgcgctgtgtgggctaccccctgcctggcttccccctggttcaccctgaccgctaaccagaacccctccccaccctggtccaagctgacctaccccaagccccacgacgctgctaccttctactgccccttcctgtacccatccccacctcgttccccatcccagttctccggtttccagcgtgtgtccaccggtcccgagtgccgtaacgagactctgtacctgctgtacaaccgcgagggccagaccctggtcgagaggtcctccacctgggtcaagaaggtcatctggtacttgtccggtcgtaaccagaccatcctgcagcgtatgccccgtaccgcttccaagccctccgacggcaacgtgcagatctccgtcgaggacgctaagatcttcggtgctcacatggtgcccaagcagaccaagctgctgcgtttcgtggtcaacgacggcacccgttaccagatgtgcgtgatgaagctggaatcctgggctcacgtgttccgtgactactccgtgtccttccaagtgcgcctgaccttcaccgaggctaacaaccagacctacaccttctgcacccaccccaacctgatcgtgtaagtcgacaagcttgtcgagaagtactagaggatcataatcagccataccacatttgtagaggttttacttgctttaaaaaacctcccacacctccccctgaacctgaaacataaaatgaatgcaattgttgttgttaacttgtttattgcagcttataatggttacaaataaagcaatagcatcacaaatttcacaaataaagcatttttttcactgcattctagttgtggtttgtccaaactcatcaatgtatcttatcatgtctggatctgatcactgcttgagcctagaagatccggctgctaacaaagcccgaaaggaagctgagttggctgctgggtgcctaatgagtgagctaactcacattaattgcccggaatattaatagatcatggagataattaaaatgataaccatctcgcaaataaataagtattttactgttttcgtaacagttttgtaataaaaaaacctataaatattccggattattcataccgtcccaccatcgggcgcggatccgccaccggatccgccaccatgcgtctgtgccgtgtgtggctgtccgtgtgcctgtgcgctgtggtgctgggacagtgccagcgtgaaaccgctgagaagaacgactactaccgtgtgccccactactgggacgcttgctcccgtgctctgcccgaccagacccgttacaagtacgtcgagcagctggtggacctgaccctgaactaccactacgacgcttcccacggcctggacaacttcgacgtgctgaagcgtatcaacgtgaccgaggtgtccctgctgatctccgacttccgtcgtcagaaccgtcgtggtggcaccaacaagcgtaccaccttcaacgctgctggttccctggctccccacgctcgttccttggagttctccgtgcgtctgttcgccaactaataaaagcttgtcgagaagtactagaggatcataatcagccataccacatttgtagaggttttacttgctttaaaaaacctcccacacctccccctgaacctgaaacataaaatgaatgcaattgttgttgttaacttgtttattgcagcttataatggttacaaataaagcaatagcatcacaaatttcacaaataaagcatttttttcactgcattctagttgtggtttgtccaaactcatcaatgtatcttatcatgtctggatctgatcactgcttgagcctagaagatccggctgctaacaaagcccgaaaggaagctgagttggctgctgccaccgctgagcaataactatcataacccccggaatattaatagatcatggagataattaaaatgataaccatctcgcaaataaataagtattttactgttttcgtaacagttttgtaataaaaaaacctataaatattccggattattcataccgtcccaccatcgggcgcggatcccggtccgaagcgcgcggaattcaaaggcctaccgtcgacgccaccatggaatcccgtatctggtgcctggtcgtgtgcgtgaacctgtgcatcgtgtgcctgggtgctgctgtgtcctcctcctccacccgtggcacctccgctacccactcccaccactcctcccacaccacctccgccgctcactcccgttccggttccgtgtcccagcgtgtgacctcctcccagaccgtgtcccacggtgtcaacgagactatctacaacaccaccctgaagtacggcgacgtcgtgggtgtcaacaccaccaagtacccctaccgtgtgtgctccatggctcagggcaccgacctgatccgtttcgagcgtaacatcgtgtgcacctccatgaagcccatcaacgaggacctggacgagggtatcatggtggtgtacaagcgcaacatcgtggctcacaccttcaaggtccgcgtgtaccagaaggtgctgaccttccgtcgttcctacgcttacatccacaccacttacctgctgggttccaacaccgagtacgtggcccctcccatgtgggagatccaccacatcaactcccactcccagtgctactcctcttactcccgtgtgatcgctggcaccgtgttcgtggcttaccaccgtgactcctacgagaacaagaccatgcagctgatgcccgacgactactccaacacccactccacccgttacgtgaccgtgaaggaccagtggcactcccgtggttccacctggctgtaccgtgaaacctgcaacctgaactgcatggtcaccatcaccaccgctcgttccaagtacccttaccacttcttcgctacctccaccggcgacgtggtggacatctcccccttctacaacggtactaaccgtaacgcttcctacttcggcgagaacgctgacaagttcttcatcttccccaactacaccatcgtgtccgacttcggtcgtcccaactccgctctggaaacccaccgtctggtggctttcttggagcgtgctgactccgtgatctcctgggacatccaggacgagaagaacgtgacctgccagctgaccttctgggaggcttccgagcgtaccatccgttccgaggctgaggactcctaccacttctccagcgctaagatgaccgctaccttcctgtccaagaaacaagaggtcaacatgtccgactccgccctggactgcgtgcgtgacgaggctatcaacaagctgcagcagatcttcaacacctcctacaaccagacctacgagaagtacggaaacgtgtccgtgttcgagactaccggtggcctggtggtgttctggcagggtatcaagcagaagtccctggtcgagctggaacgtctggctaaccgttcctccctgaacctgacccacaaccgtaccaagcgttccaccgacggcaacaacgctactcacctgtccaacatggaatccgtgcacaacctggtgtacgctcagctgcagttcacctacgacaccctgcgcggttacatcaaccgtgctctggctcagatcgctgaggcttggtgcgtggaccagcgtcgtaccctggaagtgttcaaggaactgtccaagatcaacccctccgctatcctgtccgccatctacaacaagcctatcgctgctcgtttcatgggcgacgtgctgggcctggcttcctgcgtgaccatcaaccagacttccgtgaaggtgctgcgtgacatgaacgtgaaggaatcccccggtcgttgctactcccgtcccgtggtcatcttcaacttcgctaactcctcctacgtgcagtacggccagctgggcgaggacaacgagatcctgctgggcaaccaccgtaccgaggaatgccagctgccctccctgaagatcttcatcgctggcaactccgcttacgaatacgtggactacctgttcaagcgcatgatcgacctgtcctccatctctaccgtggactccatgatcgctctggacatcgaccccctggaaaacaccgacttccgtgtgctggaactgtactcccagaaggaactgcgttccatcaacgtgttcgacctggaagagatcatgcgcgagttcaactcctacaagcagcgtgttaagtacgtcgaggacaaggtggtggaccccctgcccccctacctgaagggactggacgacctgatgtccggcctgggagctgccggcaaggctgtgggtgtcgctatcggtgctgtgggtggtgctgtggcttccgtggtcgagggtgtcgccaccttcctgaagaaccccttcggtgctttcaccatcatcctggtggctatcgctgtggtcatcatcatctacctgatctacacccgtcagcgtcgtctgtgcatgcagcccctgcagaacctgttcccctacctggtgtccgctgacggtactaccgtgacctccggcaacaccaaggacacctccctgcaggctcccccatcctacgaggaatccgtctacaactccggtcgcaagggtcccggtcccccttcctccgacgcttctaccgctgctcccccatacaccaacgagcaggcttaccagatgctgctggctctcgtgcgtctggacgctgagcagcgtgcacagcagaacggcaccgactccctggacggccagaccggaacccaggacaagggccagaagcccaacctgctggaccgtctgcgtcaccgcaagaacggttaccgtcacctgaaggactccgacgaggaagagaacgtctaaggcgcgccaagcttgtcgagaagtactagagatcataatcagccataccacatttgtagaggttttacttgctttaaaaaacctcccacacctccccctgaacctgaaacataaaatgaatgcaattgttgttgttaacttgtttattgcagcttataatggttacaaataaagcaatagcatcacaaatttcacaaataaagcatttttttcactgcattctagttgtggtttgtccaaactcatcaatgtatcttatcatgtctggatctgatcactgcttgagcctagaagatccggctgctaacaaagcccgaaaggaagctgggaatattaatagatcatggagataattaaaatgataaccatctcgcaaataaataagtattttactgttttcgtaacagttttgtaataaaaaaacctataaatattccggattattcataccgtcccaccatcgggcgcggatccgccaccatgcgtcccggcctgccctcctacctgatcgtgctggctgtgtgcctgctgtcccacctcctgtcctcccgttacggtgctgaggctatctccgagcccctggacaaggctttccacctcctgctgaacacctacggtcgtcctatccgtttcctgcgcgagaacaccacccagtgcacctacaactcctccctgcgcaactccaccgtcgtccgcgagaacgctatctccttcaacttcttccagtcctacaaccagtactacgtgttccacatgccccgttgcctgttcgctggtcccctggctgagcagttcctgaaccaggtggacctgaccgagactctcgagcgttaccagcagcgtctgaacacttacgctctggtgtccaaggacctggcttcctaccgttccttcagccagcagctgaaggctcaggactccctgggcgagcagcccaccactgtgcctccccctatcgacctgtccatcccccacgtgtggatgcccccccagaccactcctcacggctggaccgagtcccacaccacctccggactgcaccgtccccacttcaaccagacctgcatcctgttcgacggtcacgacctgctgttctccaccgtgaccccctgcctgcaccagggcttctacctcatcgacgagctgcgttacgtgaagatcaccctgaccgaggatttcttcgtggtcaccgtgtccatcgacgacgacacccccatgctgctgatcttcggtcacctcccccgtgtgctgttcaaggctccctaccagcgtgacaacttcatcctgcgtcagaccgagaagcacgagctgctggtgctggtcaagaaggaccagctgaaccgtcactcttacctgaaggaccccgacttcctggacgctgctctggacttcaactacctggacctgtccgctctgctgaggaactccttccaccgttacgctgtggacgtgctgaagtccggtcgttgccagatgctggaccgtcgtaccgtcgagatggctttcgcttacgccctggctctgttcgctgctgctcgtcaagaagaggctggcgctcaggtgtccgtgccccgtgctctggaccgtcaggctgctctgctgcagatccaagagttcatgatcacttgcctgtcccagaccccccctcgtaccaccctgctgctgtaccccaccgctgtggacctggctaagcgtgctctgtggacccccaaccagatcaccgacatcacctccctcgtgcgtctggtgtacatcctgtccaagcagaaccagcagcacctgatcccccagtgggctctgcgtcagatcgctgacttcgctctgaagctgcacaagacccacctggcttcattcctcagcgctttcgctcgccaagagctgtacctgatgggttccctggtgcactccatgctggtgcacaccaccgagcgtcgcgagatcttcatcgtggaaaccggcctgtgctccctggccgagctgtcccacttcacccagctgctggctcacccccaccacgagtacctgtccgacctgtacaccccctgctcctcttccggtcgtcgtgaccactccctggaacgtctgacccgtctgttccccgacgctaccgtgcctaccaccgtgcctgctgctctgtccatcctgtctaccatgcagccctccaccctggaaaccttccccgacctgttctgcctgcctctgggcgagtccttctccgctctgaccgtgtccgagcacgtgtcctacgtggtcaccaaccagtacctgatcaagggcatctcctaccccgtgtccaccaccgtcgtgggccagtccctgatcatcacccagaccgactcccagaccaagtgcgagctgacccgtaacatgcacaccactcactccatcaccgctgctctgaacatctccctcgagaactgcgctttctgccagtccgctctgttggagtacgacgacactcagggtgtcatcaacatcatgtacatgcacgactccgacgacgtgctgttcgctctggacccctacaacgaggtggtggtgtcctccccccgtacccactacctgatgctgctgaagaacggcaccgtgctggaagtgaccgacgtggtggtggacgctaccgaccgtctgctgatgatgtccgtgtacgctctgtccgctatcatcggcatctacctgctgtaccgtatgctgaagacctgctaaggcgccaagctttgtcgagaagtactagaggatcataatcagccataccacatttgtagaggttttacttgctttaaaaaacctcccacacctccccctgaacctgaaacataaaatgaatgcaattgttgttgttaacttgtttattgcagcttataatggttacaaataaagcaatagcatcacaaatttcacaaataaagcatttttttcactgcattctagttgtggtttgtccaaactcatcaatgtatcttatcatgtctggatctgatcactgcttgagcctagaagatccggctgctaacaaagcccgaaaggaagctgagttggctgctgctgagtagtgcgcgagcaaaatttaagctacaacaaggcacgcgtccggaatattaatagatcatggagataattaaaatgataaccatctcgcaaataaataagtattttactgttttcgtaacagttttgtaataaaaaaacctataaatattccggattattcataccgtcccaccatcgggcgcggatcccggtccgaagcgcgcggaattcaaaggcctacgtcgacgccaccatggaatcccgtggtcgtcgttgccccgagatgatctccgtgctgggtcccatctccggtcacgtcctgaaggctgtgttctcccgtggcgacacccccgtgctgccccacgaaactcgtctgctgcagaccggtatccacgtgcgtgtgtcccagccctccctgatcctggtgtcccagtacacccccgactccaccccttgccaccgcggagacaaccagctgcaggtccagcacacctacttcaccggttccgaggtcgagaacgtgtccgtgaacgtgcacaaccccaccggtcgttccatctgcccctcccaagagcccatgtccatctacgtgtacgctctgcccctgaagatgctgaacatcccctccatcaacgtgcaccactacccctccgctgctgagcgcaagcaccgtcacctccccgtggctgacgctgtgatccacgcttccggcaagcagatgtggcaggctcgtctgaccgtgtccggcctggcttggacccgtcagcagaaccagtggaaggaacccgacgtgtactacacctccgctttcgtgttccccaccaaggacgtggccctgcgtcacgtcgtgtgcgctcacgaactcgtgtgctccatggaaaacacccgtgctaccaagatgcaagtgatcggcgaccagtacgtgaaggtgtacctggaatccttctgcgaggacgtgccctccggcaagctgttcatgcacgtgaccctgggttccgacgtggaagaggacctgaccatgacccgtaacccccagcccttcatgcgtccccacgagcgtaacggtttcaccgtgctgtgccccaagaacatgatcatcaagcccggcaagatctcccacatcatgctggacgtggccttcacctcccacgagcacttcggcctgctgtgccctaagtccatccccggcctgtccatctccggcaacctgctgatgaacggccagcagatcttcctggaagtgcaggctatccgtgaaaccgtcgagctgcgtcagtacgaccctgtggctgctctgttcttcttcgacatcgacctgctgctgcagcgtggtccccagtactccgagcaccccaccttcaccagccagtaccgtatccagggcaagctggaataccgtcacacctgggaccgtcacgacgagggtgctgctcagggcgacgacgacgtgtggacctccggttccgactccgacgaggaactggtcaccaccgagcgcaagaccccccgtgtgaccggtggtggtgctatggctggtgcttccacctccgctggtcgcaagcgcaagtccgcttcctccgctaccgcttgcaccgctggtgtcatgacccgtggtcgcctgaaggctgagtccaccgtggctcccgaagaggacactgacgaggactccgacaacgagatccacaaccccgctgtgttcacctggcccccctggcaggctggtatcctggctcgtaacctggtgcccatggtggctaccgtgcagggccagaacctgaagtaccaagagttcttctgggacgccaacgacatctaccgtatcttcgctgagctggaaggcgtgtggcagcccgctgctcagcccaagcgtcgtcgtcaccgtcaggacgctctgcctggtccctgtatcgcttccacccccaagaagcaccgcggctaaaagcttgtcgagaagtactagaggatcataatcagccataccacatttgtagaggttttacttgctttaaaaaacctcccacacctccccctgaacctgaaacataaaatgaatgcaattgttgttgttaacttgtttattgcagcttataatggttacaaataaagcaatagcatcacaaatttcacaaataaagcatttttttcactgcattctagttgtggtttgtccaaactcatcaatgtatcttatcatgtctggatctgatcactgcttgagcctagaagatccggctgctaacaaagcccgaaaggaagctgagttggctgctgccaccgctgagcaataactatcataacccctaggagatccgaaccagataagtgaaatctagttccaaactattttgtcatttttaattttcgtattagcttacgacgctacacccagttcccatctattttgtcactcttccctaaataatccttaaaaactccatttccacccctcccagttcccaactattttgtccgcccaca

SEQ ID NO: 59 - DNA, 11787 bp, Artificial Sequence
  Synthetic construct
ttgttccagtttggaacaagagtccactattaaagaacgtggactccaacgtcaaagggcgaaaaaccgtctatcagggcgatggcccactacgtgaaccatcaccctaatcaagttttttggggtcgaggtgccgtaaagcactaaatcggaaccctaaagggagcccccgatttagagcttgacggggaaagccggcgaacgtggcgagaaaggaagggaagaaagcgaaaggagcgggcgctagggcgctggcaagtgtagcggtcacgctgcgcgtaaccaccacacccgccgcgcttaatgcgccgctacagggcgcgtccattcgccattcaggctgcgcaactgttgggaagggcgatcggtgcgggcctcttcgctattacgccagctggcgaaagggggatgtgctgcaaggcgattaagttgggtaacgccagggttttcccagtcacgacgttgtaaaacgacggccagtgcatagaccagccgcgtaacctggcaaaatcggttacggttgagtaataaatggatgccctgcgtaagcgggtgtgggcggacaataaagtcttaaactgaacaaaatagatctaaactatgacaataaagtcttaaactagacagaatagttgtaaactgaaatcagtccagttatgctgtgaaaaagcatactggacttttgttatggctaaagcaaactcttcattttctgaagtgcaaattgcccgtcgtattaaagaggggcgtggccaagggcatggtaaagactatattcgcggcgttgtgacaatttaccgaacaactccgcggccgggaagccgatctcggcttgaacgaattgttaggtggcggtacttgggtcgatatcaaagtgcatcacttcttcccgtatgcccaactttgtatagagagccactgcgggatcgtcaccgtaatctgcttgcacgtagatcacataagcaccaagcgcgttggcctcatgcttgaggagattgatgagcgcggtggcaatgccctgcctccggtgctcgccggagactgcgagatcatagatatagatctcactacgcggctgctcaaacttgggcagaacgtaagccgcgagagcgccaacaaccgcttcttggtcgaaggcagcaagcgcgatgaatgtcttactacggagcaagttcccgaggtaatcggagtccggctgatgttgggagtaggtggctacgtctccgaactcacgaccgaaaagatcaagagcagcccgcatggatttgacttggtcagggccgagcctacatgtgcgaatgatgcccatacttgagccacctaactttgttttagggcgactgccctgctgcgtaacatcgttgctgctgcgtaacatcgttgctgctccataacatcaaacatcgacccacggcgtaacgcgcttgctgcttggatgcccgaggcatagactgtacaaaaaaacagtcataacaagccatgaaaaccgccactgcgccgttaccaccgctgcgttcggtcaaggttctggaccagttgcgtgagcgcatacgctacttgcattacagtttacgaaccgaacaggcttatgtcaactgggtttgtgccttcatccgtttccacggtgtgcgtcacccggcaaccttgggcagcagcgaagtcgaggcatttctgtcctggctggcgaacgagcgcaaggtttcggtctccacgcatcgtcaggcattggcggccttgctgttcttctacggcaaggtgctgtgcacggatctgcccttgcttcaggagatcggtagacctcggccgtcgcggcgcttgccggtggtgctgaccccggatgaagtggttcgcatcctcggttttctggaaggcgagcatcgtttgttcgcccaggactctagctatagttctagtggttggctacagctttgtttgtactatcaacaggttgaactgctgatcaacagatcctctacgcggccgcggtaccataacttcgtatagcatacattatacgaagttatctggtttaaacgtacccgtagtggctatggcagggcttgccgccccgacgttggctgcgagccctgggccttcacccgaacttgggggttggggtggggaaaaggaagaaacgcgggcgtattggtcccaatggggtctcggtggggtatcgacagagtgccagccctgggaccgaaccccgcgtttatgaacaaacgacccaacacccgtgcgttttattctgtctttttattgccgtcatagcgcgggttccttccggtattgtctccttccgtgtttcagttagcctcccccatctcccggtaccgcatgctatgcatcagctgctagcaccatggctcgagatcccgggtgatcaagtcttcgtcgagtgattgtaaataaaatgtaatttacagtatagtattttaattaatatacaaatgatttgataataattcttatttaactataatatattgtgttgggttgaattaaaggtccgtatactagtatcgattcgcgacctactccggaatattaatagatcatggagataattaaaatgataaccatctcgcaaataaataagtattttactgttttcgtaacagttttgtaataaaaaaacctataaatattccggattattcataccgtcccaccatcgggcgcggatccgccaccatgcgtcccggcctgccctcctacctgatcgtgctggctgtgtgcctgctgtcccacctcctgtcctcccgttacggtgctgaggctatctccgagcccctggacaaggctttccacctcctgctgaacacctacggtcgtcctatccgtttcctgcgcgagaacaccacccagtgcacctacaactcctccctgcgcaactccaccgtcgtccgcgagaacgctatctccttcaacttcttccagtcctacaaccagtactacgtgttccacatgccccgttgcctgttcgctggtcccctggctgagcagttcctgaaccaggtggacctgaccgagactctcgagcgttaccagcagcgtctgaacacttacgctctggtgtccaaggacctggcttcctaccgttccttcagccagcagctgaaggctcaggactccctgggcgagcagcccaccactgtgcctccccctatcgacctgtccatcccccacgtgtggatgcccccccagaccactcctcacggctggaccgagtcccacaccacctccggactgcaccgtccccacttcaaccagacctgcatcctgttcgacggtcacgacctgctgttctccaccgtgaccccctgcctgcaccagggcttctacctcatcgacgagctgcgttacgtgaagatcaccctgaccgaggatttcttcgtggtcaccgtgtccatcgacgacgacacccccatgctgctgatcttcggtcacctcccccgtgtgctgttcaaggctccctaccagcgtgacaacttcatcctgcgtcagaccgagaagcacgagctgctggtgctggtcaagaaggaccagctgaaccgtcactcttacctgaaggaccccgacttcctggacgctgctctggacttcaactacctggacctgtccgctctgctgaggaactccttccaccgttacgctgtggacgtgctgaagtccggtcgttgccagatgctggaccgtcgtaccgtcgagatggctttcgcttacgccctggctctgttcgctgctgctcgtcaagaagaggctggcgctcaggtgtccgtgccccgtgctctggaccgtcaggctgctctgctgcagatccaagagttcatgatcacttgcctgtcccagaccccccctcgtaccaccctgctgctgtaccccaccgctgtggacctggctaagcgtgctctgtggacccccaaccagatcaccgacatcacctccctcgtgcgtctggtgtacatcctgtccaagcagaaccagcagcacctgatcccccagtgggctctgcgtcagatcgctgacttcgctctgaagctgcacaagacccacctggcttcattcctcagcgctttcgctcgccaagagctgtacctgatgggttccctggtgcactccatgctggtgcacaccaccgagcgtcgcgagatcttcatcgtggaaaccggcctgtgctccctggccgagctgtcccacttcacccagctgctggctcacccccaccacgagtacctgtccgacctgtacaccccctgctcctcttccggtcgtcgtgaccactccctggaacgtctgacccgtctgttccccgacgctaccgtgcctaccaccgtgcctgctgctctgtccatcctgtctaccatgcagccctccaccctggaaaccttccccgacctgttctgcctgcctctgggcgagtccttctccgctctgaccgtgtccgagcacgtgtcctacgtggtcaccaaccagtacctgatcaagggcatctcctaccccgtgtccaccaccgtcgtgggccagtccctgatcatcacccagaccgactcccagaccaagtgcgagctgacccgtaacatgcacaccactcactccatcaccgctgctctgaacatctccctcgagaactgcgctttctgccagtccgctctgttggagtacgacgacactcagggtgtcatcaacatcatgtacatgcacgactccgacgacgtgctgttcgctctggacccctacaacgaggtggtggtgtcctccccccgtacccactacctgatgctgctgaagaacggcaccgtgctggaagtgaccgacgtggtggtggacgctaccgactccggcgccggaagcggcggaggggggtctggggggggaggcagccaccaccatcaccaccaccatcactaagaattcaagcttgtcgagaagtactagaggatcataatcagccataccacatttgtagaggttttacttgctttaaaaaacctcccacacctccccctgaacctgaaacataaaatgaatgcaattgttgttgttaacttgtttattgcagcttataatggttacaaataaagcaatagcatcacaaatttcacaaataaagcatttttttcactgcattctagttgtggtttgtccaaactcatcaatgtatcttatcatgtctggatctgatcactgcttgagcctagaagatccggctgctaacaaagcccgaaaggaagctgagttggctgctgccaccgctgagcaataactatcataacccctaggggcctctaaacgggtcttgaggggttttttgctgaaaggaggaactatatccggatctgaacaggagggacagctgatagaaacagaagccactggagcacctcaaaaacaccatcatacactaaatcagtaagttggcagcatcacccgacgcactttgcgccgaataaatacctgtgacggaagatcacttcgcagaataaataaatcctggtgtccctgttgataccgggaagccctgggccaacttttggcgaaaatgagacgttgatcggcacgtaagaggttccaactttcaccataatgaaataagatcactaccgggcgtattttttgagttatcgagattttcaggagctaaggaagctaaaatggagaaaaaaatcactggatataccaccgttgatatatcccaatggcatcgtaaagaacattttgaggcatttcagtcagttgctcaatgtacctataaccagaccgttcagctggatattacggcctttttaaagaccgtaaagaaaaataagcacaagttttatccggcctttattcacattcttgcccgcctgatgaatgctcatccggaattccgtatggcaatgaaagacggtgagctggtgatatgggatagtgttcacccttgttacaccgttttccatgagcaaactgaaacgttttcatcgctctggagtgaataccacgacgatttccggcagtttctacacatatattcgcaagatgtggcgtgttacggtgaaaacctggcctatttccctaaagggtttattgagaatatgtttttcgtctcagccaatccctgggtgagtttcaccagttttgatttaaacgtggccaatatggacaacttcttcgcccccgttttcaccatgggcaaatattatacgcaaggcgacaaggtgctgatgccgctggcgattcaggttcatcatgccgtttgtgatggcttccatgtcggcagaatgcttaatgaattacaacagtactgcgatgagtggcagggcggggcgtaatttttttaaggcagttattggtgcccttaaacgcctggttgctacgcctgaataagtgataataagcggatgaatggcagaaattcgaaagcaaattcgacccggtcgtcggttcagggcagggtcgttaaatagccgcttatgtctattgctggtttaccggtttattgactaccggaagcagtgtgaccgtgtgcttctcaaatgcctgaggccagtttgctcaggctctccccgtggaggtaataattgacgatatgatcatttattctgcctcccagctgacattcatccggggtcagcaccgtttctgcggactggctttctacgtgttccgcttcctttagcagcccttgcgccctgagtgcttgcggcagcgtgaagctaattctgtcagccgttaagtgttcctgtgtcactcaaaattgctttgagaggctctaagggcttctcagtgcgttacatccctggcttgttgtccacaaccgttaaaccttaaaagctttaaaagccttatatattcttttttttcttataaaacttaaaaccttagaggctatttaagttgctgatttatattaattttattgttcaaacatgagagcttagtacgtgaaacatgagagcttagtacgttagccatgagagcttagtacgttagccatgagggtttagttcgttaaacatgagagcttagtacgttaaacatgagagcttagtacgtgaaacatgagagcttagtacgtactatcaacaggttgaactgctgatcaacagatcctctacgcggccgcggtaccataacttcgtatagcatacattatacgaagttatctggtttaaacgtacccgtagtggctatggcagggcttgccgccccgacgttggctgcgagccctgggccttcacccgaacttgggggttggggtggggaaaaggaagaaacgcgggcgtattggtcccaatggggtctcggtggggtatcgacagagtgccagccctgggaccgaaccccgcgtttatgaacaaacgacccaacacccgtgcgttttattctgtctttttattgccgtcatagcgcgggttccttccggtattgtctccttccgtgtttcagttagcctcccccatctcccggtaccgcatgctatgcatcagctgctagcttagcgagcgtccacagcctggggaccgtaacgggagtgagcgggcaggttcacacgggtctgcttcagctcagggggcaggccagcgtagtacttgtccaggtgacgcagcaggggggggtccagctggtgacgcaggcagaattccttcacagcgttgtacaggccgtagaacagggtgataccctcgggagcagcagcggtggacacgggcagacgcacagcacggttggtacgggtagcctcgttacggatagccaccaccacgttgaacagggaggggggcaccagctcgaaacccagcacgtgttcggtgaagatggaacgaccgtaggacagacgagtcaggtcgtaaccacggcacaggtcgtccacgcaagtgtacacagcgggggaaccgtcgccgcactcggagtaaccgcgcatcacggtcatccaacggggagcggtgtcggaggacagcagggtcagcagagcacgcagctggtcggggttgttgtacagcagggccagggtgtccaggaaagcgtcgtccagcagcacggagttagcagcctcgggggtcacgggacggtaacggatcagctgggacaggggaccgtccctacgggtcacgttgaccaggggacgcagccaggactcgtacttgtcgccctggaacacctctcccagcaggcaacgacgggtcagctcggggcactcagcgggcaccttctcagccacggtgggagccacggacacggtagcggaggacacgatgggcagcagcaggcagcaccacagcagagccacgggaccgggggagaaggagaaaccgcagtcgggacgacggcacatggtggctcgagatcccgggtgatcaagtcttcgtcgagtgattgtaaataaaatgtaatttacagtatagtattttaattaatatacaaatgatttgataataattcttatttaactataatatattgtgttgggttgaattaaaggtccgtatactagtatcgattcgcgacctactccggaatattaatagatcatggagataattaaaatgataaccatctcgcaaataaataagtattttactgttttcgtaacagttttgtaataaaaaaacctataaatattccggattattcataccgtcccaccatcgggcgcggatccgccaccatgtcccccaagaacctgacccccttcctgaccgctctgtggctgctgctgggccactcccgtgtgcctcgtgtgcgtgctgaggaatgctgcgagttcatcaacgtgaaccacccccccgagcgctgctacgacttcaagatgtgcaaccgtttcaccgtggctctgcgttgccccgacggcgaagtgtgctactcccccgaaaagaccgctgagatccgtggtatcgtgaccaccatgacccactccctgacccgtcaggtggtgcacaacaagctgacctcttgcaactacaaccccctgtacctcgaggctgacggtcgtatccgttgcggcaaggtcaacgacaaggctcagtacctgctgggtgctgctggttccgtgccctaccgttggatcaacctcgagtacgacaagatcacccgtatcgtgggcctggaccagtacctcgagtccgtgaagaagcacaagcgtctggacgtgtgccgtgctaagatgggttacatgctgcagtaaaagcttgtcgagaagtactagaggatcataatcagccataccacatttgtagaggttttacttgctttaaaaaacctcccacacctccccctgaacctgaaacataaaatgaatgcaattgttgttgttaacttgtttattgcagcttataatggttacaaataaagcaatagcatcacaaatttcacaaataaagcatttttttcactgcattctagttgtggtttgtccaaactcatcaatgtatcttatcatgtctggatctgatcactgcttgagcctagaagatccggctgctaacaaagcccgaaaggaagctgagttggctgctgtggctagctttgtttaactttaagaaggagatacatctagaccggaatattaatagatcatggagataattaaaatgataaccatctcgcaaataaataagtattttactgttttcgtaacagttttgtaataaaaaaacctataaatattccggattattcataccgtcccaccatcgggcgcggatccgccaccatgctgcgtctgctgctgcgtcaccacttccactgcctgctgctgtgcgctgtgtgggctaccccctgcctggcttccccttggtccaccctgaccgctaaccagaacccctccccaccctggtccaagctgacctactccaagccccacgacgctgctaccttctactgccccttcctgtacccatccccccctcgttccccactgcagttctccggtttccagcgtgtgctgaccggtcccgagtgccgtaacgagactctgtacctgctgtacaaccgcgagggccagaccctggtcgagaggtcctccacctgggtcaagaaggtcatctggtacttgtccggtcgtaaccagaccatcctgcagcgtatgccccgtaccgcttccaagccctccgacggcaacgtgcagatctccgtcgaggacgctaagatcttcggtgctcacatggtgcccaagcagaccaagctgctgcgtttcgtggtcaacgacggcacccgttaccagatgtgcgtgatgaagctcgagtcctgggctcacgtgttccgtgactactccgtgtccttccaagtgcgcctgaccttcaccgaggctaacaaccagacctacaccttctgcacccaccccaacctgatcgtgtaaaagcttgtcgagaagtactagaggatcataatcagccataccacatttgtagaggttttacttgctttaaaaaacctcccacacctccccctgaacctgaaacataaaatgaatgcaattgttgttgttaacttgtttattgcagcttataatggttacaaataaagcaatagcatcacaaatttcacaaataaagcatttttttcactgcattctagttgtggtttgtccaaactcatcaatgtatcttatcatgtctggatctgatcactgcttgagcctagaagatccggctgctaacaaagcccgaaaggaagctgagttggctgctgggtgcctaatgagtgagctaactcacattaattgcccggaatattaatagatcatggagataattaaaatgataaccatctcgcaaataaataagtattttactgttttcgtaacagttttgtaataaaaaaacctataaatattccggattattcataccgtcccaccatcgggcgcggatccgccaccatgcgtctgtgccgtgtgtggctgtccgtgtgcctgtgcgctgtggtgctgggccagtgccagcgtgaaaccgctgagaagaacgactactaccgtgtgccccactactgggacgcttgctcccgtgctctgcccgaccagacccgttacaagtacgtcgagcagctggtggacctgaccctgaactaccactacgacgcttcccacggcctggacaacttcgacgtgctgaagcgtatcaacgtgaccgaggtgtccctgctgatctccgacttccgtcgtcagaaccgtcgtggtggcaccaacaagcgtaccaccttcaacgctgctggttccctggctccccacgctcgttccctcgagttctccgtgcgtctgttcgctaactaaaagcttgtcgagaagtactagaggatcataatcagccataccacatttgtagaggttttacttgctttaaaaaacctcccacacctccccctgaacctgaaacataaaatgaatgcaattgttgttgttaacttgtttattgcagcttataatggttacaaataaagcaatagcatcacaaatttcacaaataaagcatttttttcactgcattctagttgtggtttgtccaaactcatcaatgtatcttatcatgtctggatctgatcactgcttgagcctagaagatccggctgctaacaaagcccgaaaggaagctgagttggctgctgccaccgctgagcaataactatcataacccctaggagatccgaaccagataagtgaaatctagttccaaactattttgtcatttttaattttcgtattagcttacgacgctacacccagttcccatctattttgtcactcttccctaaataatccttaaaaactccatttccacccctcccagttcccaactattttgtccgcccaca

SEQ ID NO: 60 - DNA, 11848 bp, Artificial Sequence
  Synthetic construct
gttgttccagtttggaacaagagtccactattaaagaacgtggactccaacgtcaaagggcgaaaaaccgtctatcagggcgatggcccactacgtgaaccatcaccctaatcaagttttttggggtcgaggtgccgtaaagcactaaatcggaaccctaaagggagcccccgatttagagcttgacggggaaagccggcgaacgtggcgagaaaggaagggaagaaagcgaaaggagcgggcgctagggcgctggcaagtgtagcggtcacgctgcgcgtaaccaccacacccgccgcgcttaatgcgccgctacagggcgcgtccattcgccattcaggctgcgcaactgttgggaagggcgatcggtgcgggcctcttcgctattacgccagctggcgaaagggggatgtgctgcaaggcgattaagttgggtaacgccagggttttcccagtcacgacgttgtaaaacgacggccagtgcatagaccagccgcgtaacctggcaaaatcggttacggttgagtaataaatggatgccctgcgtaagcgggtgtgggcggacaataaagtcttaaactgaacaaaatagatctaaactatgacaataaagtcttaaactagacagaatagttgtaaactgaaatcagtccagttatgctgtgaaaaagcatactggacttttgttatggctaaagcaaactcttcattttctgaagtgcaaattgcccgtcgtattaaagaggggcgtggccaagggcatggtaaagactatattcgcggcgttgtgacaatttaccgaacaactccgcggccgggaagccgatctcggcttgaacgaattgttaggtggcggtacttgggtcgatatcaaagtgcatcacttcttcccgtatgcccaactttgtatagagagccactgcgggatcgtcaccgtaatctgcttgcacgtagatcacataagcaccaagcgcgttggcctcatgcttgaggagattgatgagcgcggtggcaatgccctgcctccggtgctcgccggagactgcgagatcatagatatagatctcactacgcggctgctcaaacttgggcagaacgtaagccgcgagagcgccaacaaccgcttcttggtcgaaggcagcaagcgcgatgaatgtcttactacggagcaagttcccgaggtaatcggagtccggctgatgttgggagtaggtggctacgtctccgaactcacgaccgaaaagatcaagagcagcccgcatggatttgacttggtcagggccgagcctacatgtgcgaatgatgcccatacttgagccacctaactttgttttagggcgactgccctgctgcgtaacatcgttgctgctgcgtaacatcgttgctgctccataacatcaaacatcgacccacggcgtaacgcgcttgctgcttggatgcccgaggcatagactgtacaaaaaaacagtcataacaagccatgaaaaccgccactgcgccgttaccaccgctgcgttcggtcaaggttctggaccagttgcgtgagcgcatacgctacttgcattacagtttacgaaccgaacaggcttatgtcaactgggtttgtgccttcatccgtttccacggtgtgcgtcacccggcaaccttgggcagcagcgaagtcgaggcatttctgtcctggctggcgaacgagcgcaaggtttcggtctccacgcatcgtcaggcattggcggccttgctgttcttctacggcaaggtgctgtgcacggatctgcccttgcttcaggagatcggtagacctcggccgtcgcggcgcttgccggtggtgctgaccccggatgaagtggttcgcatcctcggttttctggaaggcgagcatcgtttgttcgcccaggactctagctatagttctagtggttggctacagctttgtttgtactatcaacaggttgaactgctgatcaacagatcctctacgcggccgcggtaccataacttcgtatagcatacattatacgaagttatctggtttaaacgtacccgtagtggctatggcagggcttgccgccccgacgttggctgcgagccctgggccttcacccgaacttgggggttggggtggggaaaaggaagaaacgcgggcgtattggtcccaatggggtctcggtggggtatcgacagagtgccagccctgggaccgaaccccgcgtttatgaacaaacgacccaacacccgtgcgttttattctgtctttttattgccgtcatagcgcgggttccttccggtattgtctccttccgtgtttcagttagcctcccccatctcccggtaccgcatgctatgcatcagctgctagcaccatggctcgagatcccgggtgatcaagtcttcgtcgagtgattgtaaataaaatgtaatttacagtatagtattttaattaatatacaaatgatttgataataattcttatttaactataatatattgtgttgggttgaattaaaggtccgtatactagtatcgattcgcgacctactccggaatattaatagatcatggagataattaaaatgataaccatctcgcaaataaataagtattttactgttttcgtaacagttttgtaataaaaaaacctataaatattccggattattcataccgtcccaccatcgggcgcggatccgccaccatgcgtcccggcctgccctcctacctgatcgtgctggctgtgtgcctgctgtcccacctcctgtcctcccgttacggtgctgaggctatctccgagcccctggacaaggctttccacctcctgctgaacacctacggtcgtcctatccgtttcctgcgcgagaacaccacccagtgcacctacaactcctccctgcgcaactccaccgtcgtccgcgagaacgctatctccttcaacttcttccagtcctacaaccagtactacgtgttccacatgccccgttgcctgttcgctggtcccctggctgagcagttcctgaaccaggtggacctgaccgagactctcgagcgttaccagcagcgtctgaacacttacgctctggtgtccaaggacctggcttcctaccgttccttcagccagcagctgaaggctcaggactccctgggcgagcagcccaccactgtgcctccccctatcgacctgtccatcccccacgtgtggatgcccccccagaccactcctcacggctggaccgagtcccacaccacctccggactgcaccgtccccacttcaaccagacctgcatcctgttcgacggtcacgacctgctgttctccaccgtgaccccctgcctgcaccagggcttctacctcatcgacgagctgcgttacgtgaagatcaccctgaccgaggatttcttcgtggtcaccgtgtccatcgacgacgacacccccatgctgctgatcttcggtcacctcccccgtgtgctgttcaaggctccctaccagcgtgacaacttcatcctgcgtcagaccgagaagcacgagctgctggtgctggtcaagaaggaccagctgaaccgtcactcttacctgaaggaccccgacttcctggacgctgctctggacttcaactacctggacctgtccgctctgctgaggaactccttccaccgttacgctgtggacgtgctgaagtccggtcgttgccagatgctggaccgtcgtaccgtcgagatggctttcgcttacgccctggctctgttcgctgctgctcgtcaagaagaggctggcgctcaggtgtccgtgccccgtgctctggaccgtcaggctgctctgctgcagatccaagagttcatgatcacttgcctgtcccagaccccccctcgtaccaccctgctgctgtaccccaccgctgtggacctggctaagcgtgctctgtggacccccaaccagatcaccgacatcacctccctcgtgcgtctggtgtacatcctgtccaagcagaaccagcagcacctgatcccccagtgggctctgcgtcagatcgctgacttcgctctgaagctgcacaagacccacctggcttcattcctcagcgctttcgctcgccaagagctgtacctgatgggttccctggtgcactccatgctggtgcacaccaccgagcgtcgcgagatcttcatcgtggaaaccggcctgtgctccctggccgagctgtcccacttcacccagctgctggctcacccccaccacgagtacctgtccgacctgtacaccccctgctcctcttccggtcgtcgtgaccactccctggaacgtctgacccgtctgttccccgacgctaccgtgcctaccaccgtgcctgctgctctgtccatcctgtctaccatgcagccctccaccctggaaaccttccccgacctgttctgcctgcctctgggcgagtccttctccgctctgaccgtgtccgagcacgtgtcctacgtggtcaccaaccagtacctgatcaagggcatctcctaccccgtgtccaccaccgtcgtgggccagtccctgatcatcacccagaccgactcccagaccaagtgcgagctgacccgtaacatgcacaccactcactccatcaccgctgctctgaacatctccctcgagaactgcgctttctgccagtccgctctgttggagtacgacgacactcagggtgtcatcaacatcatgtacatgcacgactccgacgacgtgctgttcgctctggacccctacaacgaggtggtggtgtcctccccccgtacccactacctgatgctgctgaagaacggcaccgtgctggaagtgaccgacgtggtggtggacgctaccgactccggcgccctggaagttctgttccaggggcccggcggaggtagctggagccacccgcagttcgaaaaaggaagcggcggaggggggtctggggggggaggcagccaccaccatcaccaccaccatcactaagaattcaagcttgtcgagaagtactagaggatcataatcagccataccacatttgtagaggttttacttgctttaaaaaacctcccacacctccccctgaacctgaaacataaaatgaatgcaattgttgttgttaacttgtttattgcagcttataatggttacaaataaagcaatagcatcacaaatttcacaaataaagcatttttttcactgcattctagttgtggtttgtccaaactcatcaatgtatcttatcatgtctggatctgatcactgcttgagcctagaagatccggctgctaacaaagcccgaaaggaagctgagttggctgctgccaccgctgagcaataactatcataacccctaggggcctctaaacgggtcttgaggggttttttgctgaaaggaggaactatatccggatctgaacaggagggacagctgatagaaacagaagccactggagcacctcaaaaacaccatcatacactaaatcagtaagttggcagcatcacccgacgcactttgcgccgaataaatacctgtgacggaagatcacttcgcagaataaataaatcctggtgtccctgttgataccgggaagccctgggccaacttttggcgaaaatgagacgttgatcggcacgtaagaggttccaactttcaccataatgaaataagatcactaccgggcgtattttttgagttatcgagattttcaggagctaaggaagctaaaatggagaaaaaaatcactggatataccaccgttgatatatcccaatggcatcgtaaagaacattttgaggcatttcagtcagttgctcaatgtacctataaccagaccgttcagctggatattacggcctttttaaagaccgtaaagaaaaataagcacaagttttatccggcctttattcacattcttgcccgcctgatgaatgctcatccggaattccgtatggcaatgaaagacggtgagctggtgatatgggatagtgttcacccttgttacaccgttttccatgagcaaactgaaacgttttcatcgctctggagtgaataccacgacgatttccggcagtttctacacatatattcgcaagatgtggcgtgttacggtgaaaacctggcctatttccctaaagggtttattgagaatatgtttttcgtctcagccaatccctgggtgagtttcaccagttttgatttaaacgtggccaatatggacaacttcttcgcccccgttttcaccatgggcaaatattatacgcaaggcgacaaggtgctgatgccgctggcgattcaggttcatcatgccgtttgtgatggcttccatgtcggcagaatgcttaatgaattacaacagtactgcgatgagtggcagggcggggcgtaatttttttaaggcagttattggtgcccttaaacgcctggttgctacgcctgaataagtgataataagcggatgaatggcagaaattcgaaagcaaattcgacccggtcgtcggttcagggcagggtcgttaaatagccgcttatgtctattgctggtttaccggtttattgactaccggaagcagtgtgaccgtgtgcttctcaaatgcctgaggccagtttgctcaggctctccccgtggaggtaataattgacgatatgatcatttattctgcctcccagctgacattcatccggggtcagcaccgtttctgcggactggctttctacgtgttccgcttcctttagcagcccttgcgccctgagtgcttgcggcagcgtgaagctaattctgtcagccgttaagtgttcctgtgtcactcaaaattgctttgagaggctctaagggcttctcagtgcgttacatccctggcttgttgtccacaaccgttaaaccttaaaagctttaaaagccttatatattcttttttttcttataaaacttaaaaccttagaggctatttaagttgctgatttatattaattttattgttcaaacatgagagcttagtacgtgaaacatgagagcttagtacgttagccatgagagcttagtacgttagccatgagggtttagttcgttaaacatgagagcttagtacgttaaacatgagagcttagtacgtgaaacatgagagcttagtacgtactatcaacaggttgaactgctgatcaacagatcctctacgcggccgcggtaccataacttcgtatagcatacattatacgaagttatctggtttaaacgtacccgtagtggctatggcagggcttgccgccccgacgttggctgcgagccctgggccttcacccgaacttgggggttggggtggggaaaaggaagaaacgcgggcgtattggtcccaatggggtctcggtggggtatcgacagagtgccagccctgggaccgaaccccgcgtttatgaacaaacgacccaacacccgtgcgttttattctgtctttttattgccgtcatagcgcgggttccttccggtattgtctccttccgtgtttcagttagcctcccccatctcccggtaccgcatgctatgcatcagctgctagcttagcgagcgtccacagcctggggaccgtaacgggagtgagcgggcaggttcacacgggtctgcttcagctcagggggcaggccagcgtagtacttgtccaggtgacgcagcaggggggggtccagctggtgacgcaggcagaattccttcacagcgttgtacaggccgtagaacagggtgataccctcgggagcagcagcggtggacacgggcagacgcacagcacggttggtacgggtagcctcgttacggatagccaccaccacgttgaacagggaggggggcaccagctcgaaacccagcacgtgttcggtgaagatggaacgaccgtaggacagacgagtcaggtcgtaaccacggcacaggtcgtccacgcaagtgtacacagcgggggaaccgtcgccgcactcggagtaaccgcgcatcacggtcatccaacggggagcggtgtcggaggacagcagggtcagcagagcacgcagctggtcggggttgttgtacagcagggccagggtgtccaggaaagcgtcgtccagcagcacggagttagcagcctcgggggtcacgggacggtaacggatcagctgggacaggggaccgtccctacgggtcacgttgaccaggggacgcagccaggactcgtacttgtcgccctggaacacctctcccagcaggcaacgacgggtcagctcggggcactcagcgggcaccttctcagccacggtgggagccacggacacggtagcggaggacacgatgggcagcagcaggcagcaccacagcagagccacgggaccgggggagaaggagaaaccgcagtcgggacgacggcacatggtggctcgagatcccgggtgatcaagtcttcgtcgagtgattgtaaataaaatgtaatttacagtatagtattttaattaatatacaaatgatttgataataattcttatttaactataatatattgtgttgggttgaattaaaggtccgtatactagtatcgattcgcgacctactccggaatattaatagatcatggagataattaaaatgataaccatctcgcaaataaataagtattttactgttttcgtaacagttttgtaataaaaaaacctataaatattccggattattcataccgtcccaccatcgggcgcggatccgccaccatgtcccccaagaacctgacccccttcctgaccgctctgtggctgctgctgggccactcccgtgtgcctcgtgtgcgtgctgaggaatgctgcgagttcatcaacgtgaaccacccccccgagcgctgctacgacttcaagatgtgcaaccgtttcaccgtggctctgcgttgccccgacggcgaagtgtgctactcccccgaaaagaccgctgagatccgtggtatcgtgaccaccatgacccactccctgacccgtcaggtggtgcacaacaagctgacctcttgcaactacaaccccctgtacctcgaggctgacggtcgtatccgttgcggcaaggtcaacgacaaggctcagtacctgctgggtgctgctggttccgtgccctaccgttggatcaacctcgagtacgacaagatcacccgtatcgtgggcctggaccagtacctcgagtccgtgaagaagcacaagcgtctggacgtgtgccgtgctaagatgggttacatgctgcagtaaaagcttgtcgagaagtactagaggatcataatcagccataccacatttgtagaggttttacttgctttaaaaaacctcccacacctccccctgaacctgaaacataaaatgaatgcaattgttgttgttaacttgtttattgcagcttataatggttacaaataaagcaatagcatcacaaatttcacaaataaagcatttttttcactgcattctagttgtggtttgtccaaactcatcaatgtatcttatcatgtctggatctgatcactgcttgagcctagaagatccggctgctaacaaagcccgaaaggaagctgagttggctgctgtggctagctttgtttaactttaagaaggagatacatctagaccggaatattaatagatcatggagataattaaaatgataaccatctcgcaaataaataagtattttactgttttcgtaacagttttgtaataaaaaaacctataaatattccggattattcataccgtcccaccatcgggcgcggatccgccaccatgctgcgtctgctgctgcgtcaccacttccactgcctgctgctgtgcgctgtgtgggctaccccctgcctggcttccccttggtccaccctgaccgctaaccagaacccctccccaccctggtccaagctgacctactccaagccccacgacgctgctaccttctactgccccttcctgtacccatccccccctcgttccccactgcagttctccggtttccagcgtgtgctgaccggtcccgagtgccgtaacgagactctgtacctgctgtacaaccgcgagggccagaccctggtcgagaggtcctccacctgggtcaagaaggtcatctggtacttgtccggtcgtaaccagaccatcctgcagcgtatgccccgtaccgcttccaagccctccgacggcaacgtgcagatctccgtcgaggacgctaagatcttcggtgctcacatggtgcccaagcagaccaagctgctgcgtttcgtggtcaacgacggcacccgttaccagatgtgcgtgatgaagctcgagtcctgggctcacgtgttccgtgactactccgtgtccttccaagtgcgcctgaccttcaccgaggctaacaaccagacctacaccttctgcacccaccccaacctgatcgtgtaaaagcttgtcgagaagtactagaggatcataatcagccataccacatttgtagaggttttacttgctttaaaaaacctcccacacctccccctgaacctgaaacataaaatgaatgcaattgttgttgttaacttgtttattgcagcttataatggttacaaataaagcaatagcatcacaaatttcacaaataaagcatttttttcactgcattctagttgtggtttgtccaaactcatcaatgtatcttatcatgtctggatctgatcactgcttgagcctagaagatccggctgctaacaaagcccgaaaggaagctgagttggctgctgggtgcctaatgagtgagctaactcacattaattgcccggaatattaatagatcatggagataattaaaatgataaccatctcgcaaataaataagtattttactgttttcgtaacagttttgtaataaaaaaacctataaatattccggattattcataccgtcccaccatcgggcgcggatccgccaccatgcgtctgtgccgtgtgtggctgtccgtgtgcctgtgcgctgtggtgctgggccagtgccagcgtgaaaccgctgagaagaacgactactaccgtgtgccccactactgggacgcttgctcccgtgctctgcccgaccagacccgttacaagtacgtcgagcagctggtggacctgaccctgaactaccactacgacgcttcccacggcctggacaacttcgacgtgctgaagcgtatcaacgtgaccgaggtgtccctgctgatctccgacttccgtcgtcagaaccgtcgtggtggcaccaacaagcgtaccaccttcaacgctgctggttccctggctccccacgctcgttccctcgagttctccgtgcgtctgttcgctaactaaaagcttgtcgagaagtactagaggatcataatcagccataccacatttgtagaggttttacttgctttaaaaaacctcccacacctccccctgaacctgaaacataaaatgaatgcaattgttgttgttaacttgtttattgcagcttataatggttacaaataaagcaatagcatcacaaatttcacaaataaagcatttttttcactgcattctagttgtggtttgtccaaactcatcaatgtatcttatcatgtctggatctgatcactgcttgagcctagaagatccggctgctaacaaagcccgaaaggaagctgagttggctgctgccaccgctgagcaataactatcataacccctaggagatccgaaccagataagtgaaatctagttccaaactattttgtcatttttaattttcgtattagcttacgacgctacacccagttcccatctattttgtcactcttccctaaataatccttaaaaactccatttccacccctcccagttcccaactattttgtccgcccaca

SEQ ID NO: 61 - DNA, 11811 bp, Artificial Sequence
  Synthetic construct
ttgttccagtttggaacaagagtccactattaaagaacgtggactccaacgtcaaagggcgaaaaaccgtctatcagggcgatggcccactacgtgaaccatcaccctaatcaagttttttggggtcgaggtgccgtaaagcactaaatcggaaccctaaagggagcccccgatttagagcttgacggggaaagccggcgaacgtggcgagaaaggaagggaagaaagcgaaaggagcgggcgctagggcgctggcaagtgtagcggtcacgctgcgcgtaaccaccacacccgccgcgcttaatgcgccgctacagggcgcgtccattcgccattcaggctgcgcaactgttgggaagggcgatcggtgcgggcctcttcgctattacgccagctggcgaaagggggatgtgctgcaaggcgattaagttgggtaacgccagggttttcccagtcacgacgttgtaaaacgacggccagtgcatagaccagccgcgtaacctggcaaaatcggttacggttgagtaataaatggatgccctgcgtaagcgggtgtgggcggacaataaagtcttaaactgaacaaaatagatctaaactatgacaataaagtcttaaactagacagaatagttgtaaactgaaatcagtccagttatgctgtgaaaaagcatactggacttttgttatggctaaagcaaactcttcattttctgaagtgcaaattgcccgtcgtattaaagaggggcgtggccaagggcatggtaaagactatattcgcggcgttgtgacaatttaccgaacaactccgcggccgggaagccgatctcggcttgaacgaattgttaggtggcggtacttgggtcgatatcaaagtgcatcacttcttcccgtatgcccaactttgtatagagagccactgcgggatcgtcaccgtaatctgcttgcacgtagatcacataagcaccaagcgcgttggcctcatgcttgaggagattgatgagcgcggtggcaatgccctgcctccggtgctcgccggagactgcgagatcatagatatagatctcactacgcggctgctcaaacttgggcagaacgtaagccgcgagagcgccaacaaccgcttcttggtcgaaggcagcaagcgcgatgaatgtcttactacggagcaagttcccgaggtaatcggagtccggctgatgttgggagtaggtggctacgtctccgaactcacgaccgaaaagatcaagagcagcccgcatggatttgacttggtcagggccgagcctacatgtgcgaatgatgcccatacttgagccacctaactttgttttagggcgactgccctgctgcgtaacatcgttgctgctgcgtaacatcgttgctgctccataacatcaaacatcgacccacggcgtaacgcgcttgctgcttggatgcccgaggcatagactgtacaaaaaaacagtcataacaagccatgaaaaccgccactgcgccgttaccaccgctgcgttcggtcaaggttctggaccagttgcgtgagcgcatacgctacttgcattacagtttacgaaccgaacaggcttatgtcaactgggtttgtgccttcatccgtttccacggtgtgcgtcacccggcaaccttgggcagcagcgaagtcgaggcatttctgtcctggctggcgaacgagcgcaaggtttcggtctccacgcatcgtcaggcattggcggccttgctgttcttctacggcaaggtgctgtgcacggatctgcccttgcttcaggagatcggtagacctcggccgtcgcggcgcttgccggtggtgctgaccccggatgaagtggttcgcatcctcggttttctggaaggcgagcatcgtttgttcgcccaggactctagctatagttctagtggttggctacagctttgtttgtactatcaacaggttgaactgctgatcaacagatcctctacgcggccgcggtaccataacttcgtatagcatacattatacgaagttatctggtttaaacgtacccgtagtggctatggcagggcttgccgccccgacgttggctgcgagccctgggccttcacccgaacttgggggttggggtggggaaaaggaagaaacgcgggcgtattggtcccaatggggtctcggtggggtatcgacagagtgccagccctgggaccgaaccccgcgtttatgaacaaacgacccaacacccgtgcgttttattctgtctttttattgccgtcatagcgcgggttccttccggtattgtctccttccgtgtttcagttagcctcccccatctcccggtaccgcatgctatgcatcagctgctagcaccatggctcgagatcccgggtgatcaagtcttcgtcgagtgattgtaaataaaatgtaatttacagtatagtattttaattaatatacaaatgatttgataataattcttatttaactataatatattgtgttgggttgaattaaaggtccgtatactagtatcgattcgcgacctactccggaatattaatagatcatggagataattaaaatgataaccatctcgcaaataaataagtattttactgttttcgtaacagttttgtaataaaaaaacctataaatattccggattattcataccgtcccaccatcgggcgcggatccgccaccatgcgtcccggcctgccctcctacctgatcgtgctggctgtgtgcctgctgtcccacctcctgtcctcccgttacggtgctgaggctatctccgagcccctggacaaggctttccacctcctgctgaacacctacggtcgtcctatccgtttcctgcgcgagaacaccacccagtgcacctacaactcctccctgcgcaactccaccgtcgtccgcgagaacgctatctccttcaacttcttccagtcctacaaccagtactacgtgttccacatgccccgttgcctgttcgctggtcccctggctgagcagttcctgaaccaggtggacctgaccgagactctcgagcgttaccagcagcgtctgaacacttacgctctggtgtccaaggacctggcttcctaccgttccttcagccagcagctgaaggctcaggactccctgggcgagcagcccaccactgtgcctccccctatcgacctgtccatcccccacgtgtggatgcccccccagaccactcctcacggctggaccgagtcccacaccacctccggactgcaccgtccccacttcaaccagacctgcatcctgttcgacggtcacgacctgctgttctccaccgtgaccccctgcctgcaccagggcttctacctcatcgacgagctgcgttacgtgaagatcaccctgaccgaggatttcttcgtggtcaccgtgtccatcgacgacgacacccccatgctgctgatcttcggtcacctcccccgtgtgctgttcaaggctccctaccagcgtgacaacttcatcctgcgtcagaccgagaagcacgagctgctggtgctggtcaagaaggaccagctgaaccgtcactcttacctgaaggaccccgacttcctggacgctgctctggacttcaactacctggacctgtccgctctgctgaggaactccttccaccgttacgctgtggacgtgctgaagtccggtcgttgccagatgctggaccgtcgtaccgtcgagatggctttcgcttacgccctggctctgttcgctgctgctcgtcaagaagaggctggcgctcaggtgtccgtgccccgtgctctggaccgtcaggctgctctgctgcagatccaagagttcatgatcacttgcctgtcccagaccccccctcgtaccaccctgctgctgtaccccaccgctgtggacctggctaagcgtgctctgtggacccccaaccagatcaccgacatcacctccctcgtgcgtctggtgtacatcctgtccaagcagaaccagcagcacctgatcccccagtgggctctgcgtcagatcgctgacttcgctctgaagctgcacaagacccacctggcttcattcctcagcgctttcgctcgccaagagctgtacctgatgggttccctggtgcactccatgctggtgcacaccaccgagcgtcgcgagatcttcatcgtggaaaccggcctgtgctccctggccgagctgtcccacttcacccagctgctggctcacccccaccacgagtacctgtccgacctgtacaccccctgctcctcttccggtcgtcgtgaccactccctggaacgtctgacccgtctgttccccgacgctaccgtgcctaccaccgtgcctgctgctctgtccatcctgtctaccatgcagccctccaccctggaaaccttccccgacctgttctgcctgcctctgggcgagtccttctccgctctgaccgtgtccgagcacgtgtcctacgtggtcaccaaccagtacctgatcaagggcatctcctaccccgtgtccaccaccgtcgtgggccagtccctgatcatcacccagaccgactcccagaccaagtgcgagctgacccgtaacatgcacaccactcactccatcaccgctgctctgaacatctccctcgagaactgcgctttctgccagtccgctctgttggagtacgacgacactcagggtgtcatcaacatcatgtacatgcacgactccgacgacgtgctgttcgctctggacccctacaacgaggtggtggtgtcctccccccgtacccactacctgatgctgctgaagaacggcaccgtgctggaagtgaccgacgtggtggtggacgctaccgactccggcgccctggaagttctgttccaggggcccggaagcggcggaggggggtctggggggggaggcagccaccaccatcaccaccaccatcactaagaattcaagcttgtcgagaagtactagaggatcataatcagccataccacatttgtagaggttttacttgctttaaaaaacctcccacacctccccctgaacctgaaacataaaatgaatgcaattgttgttgttaacttgtttattgcagcttataatggttacaaataaagcaatagcatcacaaatttcacaaataaagcatttttttcactgcattctagttgtggtttgtccaaactcatcaatgtatcttatcatgtctggatctgatcactgcttgagcctagaagatccggctgctaacaaagcccgaaaggaagctgagttggctgctgccaccgctgagcaataactatcataacccctaggggcctctaaacgggtcttgaggggttttttgctgaaaggaggaactatatccggatctgaacaggagggacagctgatagaaacagaagccactggagcacctcaaaaacaccatcatacactaaatcagtaagttggcagcatcacccgacgcactttgcgccgaataaatacctgtgacggaagatcacttcgcagaataaataaatcctggtgtccctgttgataccgggaagccctgggccaacttttggcgaaaatgagacgttgatcggcacgtaagaggttccaactttcaccataatgaaataagatcactaccgggcgtattttttgagttatcgagattttcaggagctaaggaagctaaaatggagaaaaaaatcactggatataccaccgttgatatatcccaatggcatcgtaaagaacattttgaggcatttcagtcagttgctcaatgtacctataaccagaccgttcagctggatattacggcctttttaaagaccgtaaagaaaaataagcacaagttttatccggcctttattcacattcttgcccgcctgatgaatgctcatccggaattccgtatggcaatgaaagacggtgagctggtgatatgggatagtgttcacccttgttacaccgttttccatgagcaaactgaaacgttttcatcgctctggagtgaataccacgacgatttccggcagtttctacacatatattcgcaagatgtggcgtgttacggtgaaaacctggcctatttccctaaagggtttattgagaatatgtttttcgtctcagccaatccctgggtgagtttcaccagttttgatttaaacgtggccaatatggacaacttcttcgcccccgttttcaccatgggcaaatattatacgcaaggcgacaaggtgctgatgccgctggcgattcaggttcatcatgccgtttgtgatggcttccatgtcggcagaatgcttaatgaattacaacagtactgcgatgagtggcagggcggggcgtaatttttttaaggcagttattggtgcccttaaacgcctggttgctacgcctgaataagtgataataagcggatgaatggcagaaattcgaaagcaaattcgacccggtcgtcggttcagggcagggtcgttaaatagccgcttatgtctattgctggtttaccggtttattgactaccggaagcagtgtgaccgtgtgcttctcaaatgcctgaggccagtttgctcaggctctccccgtggaggtaataattgacgatatgatcatttattctgcctcccagctgacattcatccggggtcagcaccgtttctgcggactggctttctacgtgttccgcttcctttagcagcccttgcgccctgagtgcttgcggcagcgtgaagctaattctgtcagccgttaagtgttcctgtgtcactcaaaattgctttgagaggctctaagggcttctcagtgcgttacatccctggcttgttgtccacaaccgttaaaccttaaaagctttaaaagccttatatattcttttttttcttataaaacttaaaaccttagaggctatttaagttgctgatttatattaattttattgttcaaacatgagagcttagtacgtgaaacatgagagcttagtacgttagccatgagagcttagtacgttagccatgagggtttagttcgttaaacatgagagcttagtacgttaaacatgagagcttagtacgtgaaacatgagagcttagtacgtactatcaacaggttgaactgctgatcaacagatcctctacgcggccgcggtaccataacttcgtatagcatacattatacgaagttatctggtttaaacgtacccgtagtggctatggcagggcttgccgccccgacgttggctgcgagccctgggccttcacccgaacttgggggttggggtggggaaaaggaagaaacgcgggcgtattggtcccaatggggtctcggtggggtatcgacagagtgccagccctgggaccgaaccccgcgtttatgaacaaacgacccaacacccgtgcgttttattctgtctttttattgccgtcatagcgcgggttccttccggtattgtctccttccgtgtttcagttagcctcccccatctcccggtaccgcatgctatgcatcagctgctagcttagcgagcgtccacagcctggggaccgtaacgggagtgagcgggcaggttcacacgggtctgcttcagctcagggggcaggccagcgtagtacttgtccaggtgacgcagcaggggggggtccagctggtgacgcaggcagaattccttcacagcgttgtacaggccgtagaacagggtgataccctcgggagcagcagcggtggacacgggcagacgcacagcacggttggtacgggtagcctcgttacggatagccaccaccacgttgaacagggaggggggcaccagctcgaaacccagcacgtgttcggtgaagatggaacgaccgtaggacagacgagtcaggtcgtaaccacggcacaggtcgtccacgcaagtgtacacagcgggggaaccgtcgccgcactcggagtaaccgcgcatcacggtcatccaacggggagcggtgtcggaggacagcagggtcagcagagcacgcagctggtcggggttgttgtacagcagggccagggtgtccaggaaagcgtcgtccagcagcacggagttagcagcctcgggggtcacgggacggtaacggatcagctgggacaggggaccgtccctacgggtcacgttgaccaggggacgcagccaggactcgtacttgtcgccctggaacacctctcccagcaggcaacgacgggtcagctcggggcactcagcgggcaccttctcagccacggtgggagccacggacacggtagcggaggacacgatgggcagcagcaggcagcaccacagcagagccacgggaccgggggagaaggagaaaccgcagtcgggacgacggcacatggtggctcgagatcccgggtgatcaagtcttcgtcgagtgattgtaaataaaatgtaatttacagtatagtattttaattaatatacaaatgatttgataataattcttatttaactataatatattgtgttgggttgaattaaaggtccgtatactagtatcgattcgcgacctactccggaatattaatagatcatggagataattaaaatgataaccatctcgcaaataaataagtattttactgttttcgtaacagttttgtaataaaaaaacctataaatattccggattattcataccgtcccaccatcgggcgcggatccgccaccatgtcccccaagaacctgacccccttcctgaccgctctgtggctgctgctgggccactcccgtgtgcctcgtgtgcgtgctgaggaatgctgcgagttcatcaacgtgaaccacccccccgagcgctgctacgacttcaagatgtgcaaccgtttcaccgtggctctgcgttgccccgacggcgaagtgtgctactcccccgaaaagaccgctgagatccgtggtatcgtgaccaccatgacccactccctgacccgtcaggtggtgcacaacaagctgacctcttgcaactacaaccccctgtacctcgaggctgacggtcgtatccgttgcggcaaggtcaacgacaaggctcagtacctgctgggtgctgctggttccgtgccctaccgttggatcaacctcgagtacgacaagatcacccgtatcgtgggcctggaccagtacctcgagtccgtgaagaagcacaagcgtctggacgtgtgccgtgctaagatgggttacatgctgcagtaaaagcttgtcgagaagtactagaggatcataatcagccataccacatttgtagaggttttacttgctttaaaaaacctcccacacctccccctgaacctgaaacataaaatgaatgcaattgttgttgttaacttgtttattgcagcttataatggttacaaataaagcaatagcatcacaaatttcacaaataaagcatttttttcactgcattctagttgtggtttgtccaaactcatcaatgtatcttatcatgtctggatctgatcactgcttgagcctagaagatccggctgctaacaaagcccgaaaggaagctgagttggctgctgtggctagctttgtttaactttaagaaggagatacatctagaccggaatattaatagatcatggagataattaaaatgataaccatctcgcaaataaataagtattttactgttttcgtaacagttttgtaataaaaaaacctataaatattccggattattcataccgtcccaccatcgggcgcggatccgccaccatgctgcgtctgctgctgcgtcaccacttccactgcctgctgctgtgcgctgtgtgggctaccccctgcctggcttccccttggtccaccctgaccgctaaccagaacccctccccaccctggtccaagctgacctactccaagccccacgacgctgctaccttctactgccccttcctgtacccatccccccctcgttccccactgcagttctccggtttccagcgtgtgctgaccggtcccgagtgccgtaacgagactctgtacctgctgtacaaccgcgagggccagaccctggtcgagaggtcctccacctgggtcaagaaggtcatctggtacttgtccggtcgtaaccagaccatcctgcagcgtatgccccgtaccgcttccaagccctccgacggcaacgtgcagatctccgtcgaggacgctaagatcttcggtgctcacatggtgcccaagcagaccaagctgctgcgtttcgtggtcaacgacggcacccgttaccagatgtgcgtgatgaagctcgagtcctgggctcacgtgttccgtgactactccgtgtccttccaagtgcgcctgaccttcaccgaggctaacaaccagacctacaccttctgcacccaccccaacctgatcgtgtaaaagcttgtcgagaagtactagaggatcataatcagccataccacatttgtagaggttttacttgctttaaaaaacctcccacacctccccctgaacctgaaacataaaatgaatgcaattgttgttgttaacttgtttattgcagcttataatggttacaaataaagcaatagcatcacaaatttcacaaataaagcatttttttcactgcattctagttgtggtttgtccaaactcatcaatgtatcttatcatgtctggatctgatcactgcttgagcctagaagatccggctgctaacaaagcccgaaaggaagctgagttggctgctgggtgcctaatgagtgagctaactcacattaattgcccggaatattaatagatcatggagataattaaaatgataaccatctcgcaaataaataagtattttactgttttcgtaacagttttgtaataaaaaaacctataaatattccggattattcataccgtcccaccatcgggcgcggatccgccaccatgcgtctgtgccgtgtgtggctgtccgtgtgcctgtgcgctgtggtgctgggccagtgccagcgtgaaaccgctgagaagaacgactactaccgtgtgccccactactgggacgcttgctcccgtgctctgcccgaccagacccgttacaagtacgtcgagcagctggtggacctgaccctgaactaccactacgacgcttcccacggcctggacaacttcgacgtgctgaagcgtatcaacgtgaccgaggtgtccctgctgatctccgacttccgtcgtcagaaccgtcgtggtggcaccaacaagcgtaccaccttcaacgctgctggttccctggctccccacgctcgttccctcgagttctccgtgcgtctgttcgctaactaaaagcttgtcgagaagtactagaggatcataatcagccataccacatttgtagaggttttacttgctttaaaaaacctcccacacctccccctgaacctgaaacataaaatgaatgcaattgttgttgttaacttgtttattgcagcttataatggttacaaataaagcaatagcatcacaaatttcacaaataaagcatttttttcactgcattctagttgtggtttgtccaaactcatcaatgtatcttatcatgtctggatctgatcactgcttgagcctagaagatccggctgctaacaaagcccgaaaggaagctgagttggctgctgccaccgctgagcaataactatcataacccctaggagatccgaaccagataagtgaaatctagttccaaactattttgtcatttttaattttcgtattagcttacgacgctacacccagttcccatctattttgtcactcttccctaaataatccttaaaaactccatttccacccctcccagttcccaactattttgtccgcccaca

SEQ ID NO: 62 - DNA, 11841 bp, Artificial Sequence
  Synthetic construct
ttgttccagtttggaacaagagtccactattaaagaacgtggactccaacgtcaaagggcgaaaaaccgtctatcagggcgatggcccactacgtgaaccatcaccctaatcaagttttttggggtcgaggtgccgtaaagcactaaatcggaaccctaaagggagcccccgatttagagcttgacggggaaagccggcgaacgtggcgagaaaggaagggaagaaagcgaaaggagcgggcgctagggcgctggcaagtgtagcggtcacgctgcgcgtaaccaccacacccgccgcgcttaatgcgccgctacagggcgcgtccattcgccattcaggctgcgcaactgttgggaagggcgatcggtgcgggcctcttcgctattacgccagctggcgaaagggggatgtgctgcaaggcgattaagttgggtaacgccagggttttcccagtcacgacgttgtaaaacgacggccagtgcatagaccagccgcgtaacctggcaaaatcggttacggttgagtaataaatggatgccctgcgtaagcgggtgtgggcggacaataaagtcttaaactgaacaaaatagatctaaactatgacaataaagtcttaaactagacagaatagttgtaaactgaaatcagtccagttatgctgtgaaaaagcatactggacttttgttatggctaaagcaaactcttcattttctgaagtgcaaattgcccgtcgtattaaagaggggcgtggccaagggcatggtaaagactatattcgcggcgttgtgacaatttaccgaacaactccgcggccgggaagccgatctcggcttgaacgaattgttaggtggcggtacttgggtcgatatcaaagtgcatcacttcttcccgtatgcccaactttgtatagagagccactgcgggatcgtcaccgtaatctgcttgcacgtagatcacataagcaccaagcgcgttggcctcatgcttgaggagattgatgagcgcggtggcaatgccctgcctccggtgctcgccggagactgcgagatcatagatatagatctcactacgcggctgctcaaacttgggcagaacgtaagccgcgagagcgccaacaaccgcttcttggtcgaaggcagcaagcgcgatgaatgtcttactacggagcaagttcccgaggtaatcggagtccggctgatgttgggagtaggtggctacgtctccgaactcacgaccgaaaagatcaagagcagcccgcatggatttgacttggtcagggccgagcctacatgtgcgaatgatgcccatacttgagccacctaactttgttttagggcgactgccctgctgcgtaacatcgttgctgctgcgtaacatcgttgctgctccataacatcaaacatcgacccacggcgtaacgcgcttgctgcttggatgcccgaggcatagactgtacaaaaaaacagtcataacaagccatgaaaaccgccactgcgccgttaccaccgctgcgttcggtcaaggttctggaccagttgcgtgagcgcatacgctacttgcattacagtttacgaaccgaacaggcttatgtcaactgggtttgtgccttcatccgtttccacggtgtgcgtcacccggcaaccttgggcagcagcgaagtcgaggcatttctgtcctggctggcgaacgagcgcaaggtttcggtctccacgcatcgtcaggcattggcggccttgctgttcttctacggcaaggtgctgtgcacggatctgcccttgcttcaggagatcggtagacctcggccgtcgcggcgcttgccggtggtgctgaccccggatgaagtggttcgcatcctcggttttctggaaggcgagcatcgtttgttcgcccaggactctagctatagttctagtggttggctacagctttgtttgtactatcaacaggttgaactgctgatcaacagatcctctacgcggccgcggtaccataacttcgtatagcatacattatacgaagttatctggtttaaacgtacccgtagtggctatggcagggcttgccgccccgacgttggctgcgagccctgggccttcacccgaacttgggggttggggtggggaaaaggaagaaacgcgggcgtattggtcccaatggggtctcggtggggtatcgacagagtgccagccctgggaccgaaccccgcgtttatgaacaaacgacccaacacccgtgcgttttattctgtctttttattgccgtcatagcgcgggttccttccggtattgtctccttccgtgtttcagttagcctcccccatctcccggtaccgcatgctatgcatcagctgctagcaccatggctcgagatcccgggtgatcaagtcttcgtcgagtgattgtaaataaaatgtaatttacagtatagtattttaattaatatacaaatgatttgataataattcttatttaactataatatattgtgttgggttgaattaaaggtccgtatactagtatcgattcgcgacctactccggaatattaatagatcatggagataattaaaatgataaccatctcgcaaataaataagtattttactgttttcgtaacagttttgtaataaaaaaacctataaatattccggattattcataccgtcccaccatcgggcgcggatccgccaccatgcgtcccggcctgccctcctacctgatcgtgctggctgtgtgcctgctgtcccacctcctgtcctcccgttacggtgctgaggctatctccgagcccctggacaaggctttccacctcctgctgaacacctacggtcgtcctatccgtttcctgcgcgagaacaccacccagtgcacctacaactcctccctgcgcaactccaccgtcgtccgcgagaacgctatctccttcaacttcttccagtcctacaaccagtactacgtgttccacatgccccgttgcctgttcgctggtcccctggctgagcagttcctgaaccaggtggacctgaccgagactctcgagcgttaccagcagcgtctgaacacttacgctctggtgtccaaggacctggcttcctaccgttccttcagccagcagctgaaggctcaggactccctgggcgagcagcccaccactgtgcctccccctatcgacctgtccatcccccacgtgtggatgcccccccagaccactcctcacggctggaccgagtcccacaccacctccggactgcaccgtccccacttcaaccagacctgcatcctgttcgacggtcacgacctgctgttctccaccgtgaccccctgcctgcaccagggcttctacctcatcgacgagctgcgttacgtgaagatcaccctgaccgaggatttcttcgtggtcaccgtgtccatcgacgacgacacccccatgctgctgatcttcggtcacctcccccgtgtgctgttcaaggctccctaccagcgtgacaacttcatcctgcgtcagaccgagaagcacgagctgctggtgctggtcaagaaggaccagctgaaccgtcactcttacctgaaggaccccgacttcctggacgctgctctggacttcaactacctggacctgtccgctctgctgaggaactccttccaccgttacgctgtggacgtgctgaagtccggtcgttgccagatgctggaccgtcgtaccgtcgagatggctttcgcttacgccctggctctgttcgctgctgctcgtcaagaagaggctggcgctcaggtgtccgtgccccgtgctctggaccgtcaggctgctctgctgcagatccaagagttcatgatcacttgcctgtcccagaccccccctcgtaccaccctgctgctgtaccccaccgctgtggacctggctaagcgtgctctgtggacccccaaccagatcaccgacatcacctccctcgtgcgtctggtgtacatcctgtccaagcagaaccagcagcacctgatcccccagtgggctctgcgtcagatcgctgacttcgctctgaagctgcacaagacccacctggcttcattcctcagcgctttcgctcgccaagagctgtacctgatgggttccctggtgcactccatgctggtgcacaccaccgagcgtcgcgagatcttcatcgtggaaaccggcctgtgctccctggccgagctgtcccacttcacccagctgctggctcacccccaccacgagtacctgtccgacctgtacaccccctgctcctcttccggtcgtcgtgaccactccctggaacgtctgacccgtctgttccccgacgctaccgtgcctaccaccgtgcctgctgctctgtccatcctgtctaccatgcagccctccaccctggaaaccttccccgacctgttctgcctgcctctgggcgagtccttctccgctctgaccgtgtccgagcacgtgtcctacgtggtcaccaaccagtacctgatcaagggcatctcctaccccgtgtccaccaccgtcgtgggccagtccctgatcatcacccagaccgactcccagaccaagtgcgagctgacccgtaacatgcacaccactcactccatcaccgctgctctgaacatctccctcgagaactgcgctttctgccagtccgctctgttggagtacgacgacactcagggtgtcatcaacatcatgtacatgcacgactccgacgacgtgctgttcgctctggacccctacaacgaggtggtggtgtcctccccccgtacccactacctgatgctgctgaagaacggcaccgtgctggaagtgaccgacgtggtggtggacgctaccgactccggcgccctggaagttctgttccaggggcccccggtccgagagaacctgtacttccaaggcggaagcggcggaggggggtctggggggggaggcagccaccaccatcaccaccaccatcactaagaattcaagcttgtcgagaagtactagaggatcataatcagccataccacatttgtagaggttttacttgctttaaaaaacctcccacacctccccctgaacctgaaacataaaatgaatgcaattgttgttgttaacttgtttattgcagcttataatggttacaaataaagcaatagcatcacaaatttcacaaataaagcatttttttcactgcattctagttgtggtttgtccaaactcatcaatgtatcttatcatgtctggatctgatcactgcttgagcctagaagatccggctgctaacaaagcccgaaaggaagctgagttggctgctgccaccgctgagcaataactatcataacccctaggggcctctaaacgggtcttgaggggttttttgctgaaaggaggaactatatccggatctgaacaggagggacagctgatagaaacagaagccactggagcacctcaaaaacaccatcatacactaaatcagtaagttggcagcatcacccgacgcactttgcgccgaataaatacctgtgacggaagatcacttcgcagaataaataaatcctggtgtccctgttgataccgggaagccctgggccaacttttggcgaaaatgagacgttgatcggcacgtaagaggttccaactttcaccataatgaaataagatcactaccgggcgtattttttgagttatcgagattttcaggagctaaggaagctaaaatggagaaaaaaatcactggatataccaccgttgatatatcccaatggcatcgtaaagaacattttgaggcatttcagtcagttgctcaatgtacctataaccagaccgttcagctggatattacggcctttttaaagaccgtaaagaaaaataagcacaagttttatccggcctttattcacattcttgcccgcctgatgaatgctcatccggaattccgtatggcaatgaaagacggtgagctggtgatatgggatagtgttcacccttgttacaccgttttccatgagcaaactgaaacgttttcatcgctctggagtgaataccacgacgatttccggcagtttctacacatatattcgcaagatgtggcgtgttacggtgaaaacctggcctatttccctaaagggtttattgagaatatgtttttcgtctcagccaatccctgggtgagtttcaccagttttgatttaaacgtggccaatatggacaacttcttcgcccccgttttcaccatgggcaaatattatacgcaaggcgacaaggtgctgatgccgctggcgattcaggttcatcatgccgtttgtgatggcttccatgtcggcagaatgcttaatgaattacaacagtactgcgatgagtggcagggcggggcgtaatttttttaaggcagttattggtgcccttaaacgcctggttgctacgcctgaataagtgataataagcggatgaatggcagaaattcgaaagcaaattcgacccggtcgtcggttcagggcagggtcgttaaatagccgcttatgtctattgctggtttaccggtttattgactaccggaagcagtgtgaccgtgtgcttctcaaatgcctgaggccagtttgctcaggctctccccgtggaggtaataattgacgatatgatcatttattctgcctcccagctgacattcatccggggtcagcaccgtttctgcggactggctttctacgtgttccgcttcctttagcagcccttgcgccctgagtgcttgcggcagcgtgaagctaattctgtcagccgttaagtgttcctgtgtcactcaaaattgctttgagaggctctaagggcttctcagtgcgttacatccctggcttgttgtccacaaccgttaaaccttaaaagctttaaaagccttatatattcttttttttcttataaaacttaaaaccttagaggctatttaagttgctgatttatattaattttattgttcaaacatgagagcttagtacgtgaaacatgagagcttagtacgttagccatgagagcttagtacgttagccatgagggtttagttcgttaaacatgagagcttagtacgttaaacatgagagcttagtacgtgaaacatgagagcttagtacgtactatcaacaggttgaactgctgatcaacagatcctctacgcggccgcggtaccataacttcgtatagcatacattatacgaagttatctggtttaaacgtacccgtagtggctatggcagggcttgccgccccgacgttggctgcgagccctgggccttcacccgaacttgggggttggggtggggaaaaggaagaaacgcgggcgtattggtcccaatggggtctcggtggggtatcgacagagtgccagccctgggaccgaaccccgcgtttatgaacaaacgacccaacacccgtgcgttttattctgtctttttattgccgtcatagcgcgggttccttccggtattgtctccttccgtgtttcagttagcctcccccatctcccggtaccgcatgctatgcatcagctgctagcttagcgagcgtccacagcctggggaccgtaacgggagtgagcgggcaggttcacacgggtctgcttcagctcagggggcaggccagcgtagtacttgtccaggtgacgcagcaggggggggtccagctggtgacgcaggcagaattccttcacagcgttgtacaggccgtagaacagggtgataccctcgggagcagcagcggtggacacgggcagacgcacagcacggttggtacgggtagcctcgttacggatagccaccaccacgttgaacagggaggggggcaccagctcgaaacccagcacgtgttcggtgaagatggaacgaccgtaggacagacgagtcaggtcgtaaccacggcacaggtcgtccacgcaagtgtacacagcgggggaaccgtcgccgcactcggagtaaccgcgcatcacggtcatccaacggggagcggtgtcggaggacagcagggtcagcagagcacgcagctggtcggggttgttgtacagcagggccagggtgtccaggaaagcgtcgtccagcagcacggagttagcagcctcgggggtcacgggacggtaacggatcagctgggacaggggaccgtccctacgggtcacgttgaccaggggacgcagccaggactcgtacttgtcgccctggaacacctctcccagcaggcaacgacgggtcagctcggggcactcagcgggcaccttctcagccacggtgggagccacggacacggtagcggaggacacgatgggcagcagcaggcagcaccacagcagagccacgggaccgggggagaaggagaaaccgcagtcgggacgacggcacatggtggctcgagatcccgggtgatcaagtcttcgtcgagtgattgtaaataaaatgtaatttacagtatagtattttaattaatatacaaatgatttgataataattcttatttaactataatatattgtgttgggttgaattaaaggtccgtatactagtatcgattcgcgacctactccggaatattaatagatcatggagataattaaaatgataaccatctcgcaaataaataagtattttactgttttcgtaacagttttgtaataaaaaaacctataaatattccggattattcataccgtcccaccatcgggcgcggatccgccaccatgtcccccaagaacctgacccccttcctgaccgctctgtggctgctgctgggccactcccgtgtgcctcgtgtgcgtgctgaggaatgctgcgagttcatcaacgtgaaccacccccccgagcgctgctacgacttcaagatgtgcaaccgtttcaccgtggctctgcgttgccccgacggcgaagtgtgctactcccccgaaaagaccgctgagatccgtggtatcgtgaccaccatgacccactccctgacccgtcaggtggtgcacaacaagctgacctcttgcaactacaaccccctgtacctcgaggctgacggtcgtatccgttgcggcaaggtcaacgacaaggctcagtacctgctgggtgctgctggttccgtgccctaccgttggatcaacctcgagtacgacaagatcacccgtatcgtgggcctggaccagtacctcgagtccgtgaagaagcacaagcgtctggacgtgtgccgtgctaagatgggttacatgctgcagtaaaagcttgtcgagaagtactagaggatcataatcagccataccacatttgtagaggttttacttgctttaaaaaacctcccacacctccccctgaacctgaaacataaaatgaatgcaattgttgttgttaacttgtttattgcagcttataatggttacaaataaagcaatagcatcacaaatttcacaaataaagcatttttttcactgcattctagttgtggtttgtccaaactcatcaatgtatcttatcatgtctggatctgatcactgcttgagcctagaagatccggctgctaacaaagcccgaaaggaagctgagttggctgctgtggctagctttgtttaactttaagaaggagatacatctagaccggaatattaatagatcatggagataattaaaatgataaccatctcgcaaataaataagtattttactgttttcgtaacagttttgtaataaaaaaacctataaatattccggattattcataccgtcccaccatcgggcgcggatccgccaccatgctgcgtctgctgctgcgtcaccacttccactgcctgctgctgtgcgctgtgtgggctaccccctgcctggcttccccttggtccaccctgaccgctaaccagaacccctccccaccctggtccaagctgacctactccaagccccacgacgctgctaccttctactgccccttcctgtacccatccccccctcgttccccactgcagttctccggtttccagcgtgtgctgaccggtcccgagtgccgtaacgagactctgtacctgctgtacaaccgcgagggccagaccctggtcgagaggtcctccacctgggtcaagaaggtcatctggtacttgtccggtcgtaaccagaccatcctgcagcgtatgccccgtaccgcttccaagccctccgacggcaacgtgcagatctccgtcgaggacgctaagatcttcggtgctcacatggtgcccaagcagaccaagctgctgcgtttcgtggtcaacgacggcacccgttaccagatgtgcgtgatgaagctcgagtcctgggctcacgtgttccgtgactactccgtgtccttccaagtgcgcctgaccttcaccgaggctaacaaccagacctacaccttctgcacccaccccaacctgatcgtgtaaaagcttgtcgagaagtactagaggatcataatcagccataccacatttgtagaggttttacttgctttaaaaaacctcccacacctccccctgaacctgaaacataaaatgaatgcaattgttgttgttaacttgtttattgcagcttataatggttacaaataaagcaatagcatcacaaatttcacaaataaagcatttttttcactgcattctagttgtggtttgtccaaactcatcaatgtatcttatcatgtctggatctgatcactgcttgagcctagaagatccggctgctaacaaagcccgaaaggaagctgagttggctgctgggtgcctaatgagtgagctaactcacattaattgcccggaatattaatagatcatggagataattaaaatgataaccatctcgcaaataaataagtattttactgttttcgtaacagttttgtaataaaaaaacctataaatattccggattattcataccgtcccaccatcgggcgcggatccgccaccatgcgtctgtgccgtgtgtggctgtccgtgtgcctgtgcgctgtggtgctgggccagtgccagcgtgaaaccgctgagaagaacgactactaccgtgtgccccactactgggacgcttgctcccgtgctctgcccgaccagacccgttacaagtacgtcgagcagctggtggacctgaccctgaactaccactacgacgcttcccacggcctggacaacttcgacgtgctgaagcgtatcaacgtgaccgaggtgtccctgctgatctccgacttccgtcgtcagaaccgtcgtggtggcaccaacaagcgtaccaccttcaacgctgctggttccctggctccccacgctcgttccctcgagttctccgtgcgtctgttcgctaactaaaagcttgtcgagaagtactagaggatcataatcagccataccacatttgtagaggttttacttgctttaaaaaacctcccacacctccccctgaacctgaaacataaaatgaatgcaattgttgttgttaacttgtttattgcagcttataatggttacaaataaagcaatagcatcacaaatttcacaaataaagcatttttttcactgcattctagttgtggtttgtccaaactcatcaatgtatcttatcatgtctggatctgatcactgcttgagcctagaagatccggctgctaacaaagcccgaaaggaagctgagttggctgctgccaccgctgagcaataactatcataacccctaggagatccgaaccagataagtgaaatctagttccaaactattttgtcatttttaattttcgtattagcttacgacgctacacccagttcccatctattttgtcactcttccctaaataatccttaaaaactccatttccacccctcccagttcccaactattttgtccgcccaca

SEQ ID NO: 63 - DNA, 26 bp, Artificial Sequence
  Synthetic construct
tgatttgataataattcttatttaac

SEQ ID NO: 64 - DNA, 40 bp, Artificial Sequence
  Synthetic construct
ggctagctttgtttaactttaagaaggagatacatctaga

SEQ ID NO: 65 - DNA, 57 bp, Artificial Sequence
  Synthetic construct
tgctgcccaccgctgagcaataactatcataacccccggaatattaatagatcatgg

SEQ ID NO: 66 - DNA, 21 bp, Artificial Sequence
  Synthetic construct
gtagcgtcgtaagctaatacg

SEQ ID NO: 67 - DNA, 8806 bp, Artificial Sequence
  Synthetic construct
ttgttccagtttggaacaagagtccactattaaagaacgtggactccaacgtcaaagggcgaaaaaccgtctatcagggcgatggcccactacgtgaaccatcaccctaatcaagttttttggggtcgaggtgccgtaaagcactaaatcggaaccctaaagggagcccccgatttagagcttgacggggaaagccggcgaacgtggcgagaaaggaagggaagaaagcgaaaggagcgggcgctagggcgctggcaagtgtagcggtcacgctgcgcgtaaccaccacacccgccgcgcttaatgcgccgctacagggcgcgtcgcgccattcgccattcaggctgcgcaactgttgggaagggcgatcggtgcgggcctcttcgctattacgccagctggcgaaagggggatgtgctgcaaggcgattaagttgggtaacgccagggttttcccagtcacgacgttgtaaaacgacggccagtgcatagaccagccgcgtaacctggcaaaatcggttacggttgagtaataaatggatgccctgcgtaagcgggtgtgggcggacaataaagtcttaaactgaacaaaatagatctaaactatgacaataaagtcttaaactagacagaatagttgtaaactgaaatcagtccagttatgctgtgaaaaagcatactggacttttgttatggctaaagcaaactcttcattttctgaagtgcaaattgcccgtcgtattaaagaggggcgtggccaagggcatggtaaagactatattcgcggcgttgtgacaatttaccgaacaactccgcggccgggaagccgatctcggcttgaacgaattgttaggtggcggtacttgggtcgatatcaaagtgcatcacttcttcccgtatgcccaactttgtatagagagccactgcgggatcgtcaccgtaatctgcttgcacgtagatcacataagcaccaagcgcgttggcctcatgcttgaggagattgatgagcgcggtggcaatgccctgcctccggtgctcgccggagactgcgagatcatagatatagatctcactacgcggctgctcaaacttgggcagaacgtaagccgcgagagcgccaacaaccgcttcttggtcgaaggcagcaagcgcgatgaatgtcttactacggagcaagttcccgaggtaatcggagtccggctgatgttgggagtaggtggctacgtctccgaactcacgaccgaaaagatcaagagcagcccgcatggatttgacttggtcagggccgagcctacatgtgcgaatgatgcccatacttgagccacctaactttgttttagggcgactgccctgctgcgtaacatcgttgctgctgcgtaacatcgttgctgctccataacatcaaacatcgacccacggcgtaacgcgcttgctgcttggatgcccgaggcatagactgtacaaaaaaacagtcataacaagccatgaaaaccgccactgcgccgttaccaccgctgcgttcggtcaaggttctggaccagttgcgtgagcgcatacgctacttgcattacagtttacgaaccgaacaggcttatgtcaactgggttcgtgccttcatccgtttccacggtgtgcgtcacccggcaaccttgggcagcagcgaagtcgaggcatttctgtcctggctggcgaacgagcgcaaggtttcggtctccacgcatcgtcaggcattggcggccttgctgttcttctacggcaaggtgctgtgcacggatctgcccttgcttcaggagatcggtagacctcggccgtcgcggcgcttgccggtggtgctgaccccggatgaagtggttcgcatcctcggttttctggaaggcgagcatcgtttgttcgcccaggactctagctatagttctagtggttggctacagctttgtttgtactatcaacaggttgaactgctgatcaacagatcctctacgcggccgcggtaccataacttcgtatagcatacattatacgaagttatctggtttaaacgtacccgtagtggctatggcagggcttgccgccccgacgttggctgcgagccctgggccttcacccgaacttgggggttggggtggggaaaaggaagaaacgcgggcgtattggtcccaatggggtctcggtggggtatcgacagagtgccagccctgggaccgaaccccgcgtttatgaacaaacgacccaacacccgtgcgttttattctgtctttttattgccgtcatagcgcgggttccttccggtattgtctccttccgtgtttcagttagcctcccccatctcccggtaccgcatgctatgcatcagctgctagcaccatggctcgagatcccgggtgatcaagtcttcgtcgagtgattgtaaataaaatgtaatttacagtatagtattttaattaatatacaaatgatttgataataattcttatttaactataatatattgtgttgggttgaattaaaggtccgtatactagtatcgattcgcgacctactccggaatattaatagatcatggagataattaaaatgataaccatctcgcaaataaataagtattttactgttttcgtaacagttttgtaataaaaaaacctataaatattccggattattcataccgtcccaccatcgggcgcggatccgccaccatggaaaactggtccgctctggaactgctgcccaaggtcggaatccctaccgacttcctgacccacgtcaagacctccgctggcgaggaaatgttcgaggctctgaggatctactacggcgacgaccccgagcgttacaacatccacttcgaggctatcttcggcaccttctgcaaccgtctggaatgggtgtacttcctgacttccggcctggctgctgctgctcacgctatcaagttccacgacctgaacaagctgaccaccggcaagatgctgttccacgtgcaagtgccccgtgtggcttccggtgctggcctgcctacctcccgtcagaccaccatcatggtcaccaagtactccgagaagtcccccatcaccatccctttcgagctgtccgctgcttgcctgacttacctgcgtgaaaccttcgagggcaccatcctggacaagatcctgaacgtcgaggctatgcacaccgtgctgcgtgctctgaagaacaccgctgacgctatggaacgtggcctgatccacagcttcctccagaccctgctgaggaaggctcccccctacttcgtggtgcagaccctggtcgagaacgctaccctggctcgtcaggctctgaaccgtatccagcgctccaacatcctgcagtccttcaaggctaagatgctggctaccctgttcctgctgaaccgtacccgtgaccgtgactacgtgctgaagttcctgacccgtctggctgaggctgctaccgactccatcctcgacaaccctactacctacaccacctcctccggtgctaagatctccggtgtcatggtgtccaccgctaacgtgatgcagatcatcatgtccctgctgtcctcccacatcactaaggaaaccgtgtccgctcccgctacctacggcaacttcgtgctgtcccccgagaacgctgtgaccgctatctcctaccactctatcctggctgacttcaactcctacaaggctcacctgacctccggccagccccacctccccaacgactccctgagccaggctggtgctcactccctgacccccctgtccatggacgtgatccgtctgggcgaaaagaccgtgatcatggaaaacctgcgtcgcgtgtacaagaacaccgacaccaaggaccccctggaacgtaacgtggacctgaccttcttcttccccgtgggcctgtacctgcccgaggaccgtggttacaccaccgtcgagtccaaggtcaagctgaacgacaccgtgcgtaacgctctgcccaccaccgcttacctgctgaacagggaccgtgctgtgcaaaagatcgacttcgtggacgctctcaagaccctgtgccaccccgtgctgcacgagcctgctccatgcctgcaggctttcaccgagcgtggtcccccatccgagcccgctatgcagcgtctgctggaatgccgtttccagcaagagcccatgggtggtgctgctcgtcgtatcccccacttctaccgtgtgcgccgcgaggtgccccgtaccgtgaacgagatgaagcaggacttcgtggtcaccgacttctacaaggttggaaacatcaccctgtacaccgagctgcaccctttcttcgacttcacccactgccaagagaactccgagactgtggctctgtgcaccccccgtatcgtgatcggcaacctgcccgacggcctggctcccggtcccttccacgagctgaggacctgggagatcatggaacacatgcgcctgcgtcccccacccgactacgaggaaaccctgcgtctgttcaagaccaccgtgacctcccccaactaccccgagctgtgctacctggtggacgtgctggtgcacggcaacgctgacgctttcctgctgatccgcgctttcatcgctcgttgcatcgtgaacatgttccacacccgtcagctgctggtgttcgctcactcctacgctctggtcaccctgatcgctgagcacctggctgacggtgctctgcccccccagctcctgttccactaccgtaacctggtggctgtgctgcgcctggtcacccgtatctccgctctgcccggcctgaacaacggccagctggctgaggaacccctgtccgcttacgtgaacgctctgcacgaccacaggctgtggccccccttcgtgacccacctccctcgtaacatggaaggtgtccaggtggtggctgatcgtcagcccctgaaccccgctaacatcgaggctcgtcaccacggtgtctccgacgtgccccgtctgggtgctatggacgctgacgagcccctgttcgtggacgactaccgtgctaccgacgacgagtggaccctgcaaaaggtgttctacctgtgcctgatccccgctatgaccaacaaccgtgcttgcggcctgggcctgaacctcaagactctgctggtggacctgttctaccgtcccgccttcctgctcatgcccgctgctaccgctgtgtccacctccggcaccacctccaaggaatccacctctggtgtcacccccgaggactccgtggctgctcagcgtcaggctgtgggcgagatgctgaccgagctggtcgaggacgtggccaccgacgctcacacccctctgctgcaggcttgccgcgagctgttcctggctgtgcagttcgtgggcgagcacgtgaaggtgctggaagtgcgtgctcccctggaccacgctcagaggcagggactgcccgacttcatctcccgtcagcatgtgctgtacaacggttgctgcgtcgtgaccgctcctaagaccctgatcgagtactccctgcccgtgcccttccaccgtttctactccaaccccaccatctgcgctgctctgtccgacgacatcaagcgttacgtgaccgagttcccccactaccatagacacgatggtggtttccccctgcccaccgctttcgctcacgagtaccacaactggctgcgtagccccttctcccgttactccgctacctgccccaacgtgctgcactccgtgatgaccctggctgctatgctgtacaagatctcccccgtgtccctggtgctgcagaccaaggctcacatccaccccggtttcgctctgaccgctgtgcgtaccgacaccttcgaggtggacatgctgctgtactccggcaagtcctgcacctccgtcatcatcaacaaccccatcgtgaccaaggaagagagggacatctccaccacctaccacgtgacccagaacatcaacaccgtggacatgggcctgggttacacctccaacacttgcgtggcctacgtgaaccgcgtccgcaccgacatgggtgtccgtgtgcaggacctgttccgtgtgttccccatgaacgtgtaccgccacgatgaggtggaccgttggatcaggcacgctgctggcgtcgagcgtccccagctgctggacaccgagactatctccatgctgaccttcggttccatgtccgagcgcaacgctgctgctaccgtgcacggccagaaggctgtctgcgagctgatcctgacccctgtgactatggacgtgaactacttcaagatcaccaacaaccctcgtggtcgtgcttcctgcatgctgggcgtggacccctacgacaccgaggctgccaccaaggctatctacgaccaccgcgaggctgacgctcagaccttcgctgctacccacaacccatgggcttcccaggctggttgcctgtccgacgtcctgtacaacacccgtcaccgcgagcgtctgggctacaactccaagttctactccccctgcgctcagtacttcaacaccgaggaaatcatcgctgccaacaagaccctcttcaagaccatcgacgagtacctgctgcgcgctaaggactgcatccgtggcgacaccgacactcagtacgtgtgcgtcgagggaaccgagcagctgatcgagaacccttgccgtctgacccaagaggctctgcccatcctgtccaccaccaccctggctctgatggaaactaagctgaagggtggcgctggtgctttcgctacctccgagactcacttcggcaactacgtcgtgggagagatcatccccctgcagcagtccatgctgttcaacagctaagagctcaagcttgtcgagaagtactagaggatcataatcagccataccacatttgtagaggttttacttgctttaaaaaacctcccacacctccccctgaacctgaaacataaaatgaatgcaattgttgttgttaacttgtttattgcagcttataatggttacaaataaagcaatagcatcacaaatttcacaaataaagcatttttttcactgcattctagttgtggtttgtccaaactcatcaatgtatcttatcatgtctggatctgatcactgcttgagcctagaagatccggctgctaacaaagcccgaaaggaagctgagttggctgctgtggctagctttgtttaactttaagaaggagatacatctagaaatattaatagatcatggagataattaaaatgataaccatctcgcaaataaataagtattttactgttttcgtaacagttttgtaataaaaaaacctataaatattccggattattcataccgtcccaccatcgggcgcggatccgccaccatggctgctatggaagctaacatcttctgcaccttcgaccacaagctgtctatcgctgacgtgggcaagctgaccaagctggtggctgctgtggtgcccatcccccagcgtctgcacctgatcaagcactaccagctgggcctgcaccagttcgtggaccacacccgtggttacgtgcgtctgcgtggcctgctgcgtaacatgaccctgaccctgatgcgtcgtgtcgagggcaaccagatcctgctgcacgtgcccacccacggcctgctgtacaccgtgctgaacaccggtcccgtgacctgggagaagggcgacgctctgtgcgtgctgccccccctgttccacggtcccctggctcgtgaaaacctgttgaccctgggccagtgggagctggtgctgccctggatcgtgcccatgcccctggctctggaaatcaaccagcgcctgctgatcatgggcctgttctccctggaccgttcctacgaagaagtgaaggctgctgtccagcagctgcagaccatcaccttccgtgacgctaccttcaccatccccgaccccgtgatcgaccagcacctcctgatcgacatgaagaccgcttgcctgtccatgtccatggtggctaacctggcttccgagctgaccatgacctacgtccgcaagctggctttggaggactcttccatgctgctggtcaagtgccaagagctgctgatgcgtctggaccgcgagcgttccgtgggcgagcctcgtactcccgctcgtcctcagcacgtgtcccccgacgacgagatcgctcgtctgtccgctctgttcgtgatgctgcgtcagctggacgacctgatccgcgagcaggtcgtgttcaccgtgtgcgacgtgagcccagacaacaagtccgctacctgcatcttcaagggctaaggcgcgccaagcttgtcgagaagtactagaggatcataatcagccataccacatttgtagaggttttacttgctttaaaaaacctcccacacctccccctgaacctgaaacataaaatgaatgcaattgttgttgttaacttgtttattgcagcttataatggttacaaataaagcaatagcatcacaaatttcacaaataaagcatttttttcactgcattctagttgtggtttgtccaaactcatcaatgtatcttatcatgtctggatctgatcactgcttgagcctagaagatccggctgctaacaaagcccgaaaggaagctgagttggctgctgccaccgctgagcaataactatcataacccctaggagatccgaaccagataagtgaaatctagttccaaactattttgtcatttttaattttcgtattagcttacgacgctacacccagttcccatctattttgtcactcttccctaaataatccttaaaaactccatttccacccctcccagttcccaactattttgtccgcccaca

SEQ ID NO: 68 - DNA, 14082 bp, Artificial Sequence
  Synthetic construct
ttgttccagtttggaacaagagtccactattaaagaacgtggactccaacgtcaaagggcgaaaaaccgtctatcagggcgatggcccactacgtgaaccatcaccctaatcaagttttttggggtcgaggtgccgtaaagcactaaatcggaaccctaaagggagcccccgatttagagcttgacggggaaagccggcgaacgtggcgagaaaggaagggaagaaagcgaaaggagcgggcgctagggcgctggcaagtgtagcggtcacgctgcgcgtaaccaccacacccgccgcgcttaatgcgccgctacagggcgcgtcgcgccattcgccattcaggctgcgcaactgttgggaagggcgatcggtgcgggcctcttcgctattacgccagctggcgaaagggggatgtgctgcaaggcgattaagttgggtaacgccagggttttcccagtcacgacgttgtaaaacgacggccagtgcatagaccagccgcgtaacctggcaaaatcggttacggttgagtaataaatggatgccctgcgtaagcgggtgtgggcggacaataaagtcttaaactgaacaaaatagatctaaactatgacaataaagtcttaaactagacagaatagttgtaaactgaaatcagtccagttatgctgtgaaaaagcatactggacttttgttatggctaaagcaaactcttcattttctgaagtgcaaattgcccgtcgtattaaagaggggcgtggccaagggcatggtaaagactatattcgcggcgttgtgacaatttaccgaacaactccgcggccgggaagccgatctcggcttgaacgaattgttaggtggcggtacttgggtcgatatcaaagtgcatcacttcttcccgtatgcccaactttgtatagagagccactgcgggatcgtcaccgtaatctgcttgcacgtagatcacataagcaccaagcgcgttggcctcatgcttgaggagattgatgagcgcggtggcaatgccctgcctccggtgctcgccggagactgcgagatcatagatatagatctcactacgcggctgctcaaacttgggcagaacgtaagccgcgagagcgccaacaaccgcttcttggtcgaaggcagcaagcgcgatgaatgtcttactacggagcaagttcccgaggtaatcggagtccggctgatgttgggagtaggtggctacgtctccgaactcacgaccgaaaagatcaagagcagcccgcatggatttgacttggtcagggccgagcctacatgtgcgaatgatgcccatacttgagccacctaactttgttttagggcgactgccctgctgcgtaacatcgttgctgctgcgtaacatcgttgctgctccataacatcaaacatcgacccacggcgtaacgcgcttgctgcttggatgcccgaggcatagactgtacaaaaaaacagtcataacaagccatgaaaaccgccactgcgccgttaccaccgctgcgttcggtcaaggttctggaccagttgcgtgagcgcatacgctacttgcattacagtttacgaaccgaacaggcttatgtcaactgggttcgtgccttcatccgtttccacggtgtgcgtcacccggcaaccttgggcagcagcgaagtcgaggcatttctgtcctggctggcgaacgagcgcaaggtttcggtctccacgcatcgtcaggcattggcggccttgctgttcttctacggcaaggtgctgtgcacggatctgcccttgcttcaggagatcggtagacctcggccgtcgcggcgcttgccggtggtgctgaccccggatgaagtggttcgcatcctcggttttctggaaggcgagcatcgtttgttcgcccaggactctagctatagttctagtggttggctacagctttgtttgtactatcaacaggttgaactgctgatcaacagatcctctacgcggccgcggtaccataacttcgtatagcatacattatacgaagttatctggtttaaacgtacccgtagtggctatggcagggcttgccgccccgacgttggctgcgagccctgggccttcacccgaacttgggggttggggtggggaaaaggaagaaacgcgggcgtattggtcccaatggggtctcggtggggtatcgacagagtgccagccctgggaccgaaccccgcgtttatgaacaaacgacccaacacccgtgcgttttattctgtctttttattgccgtcatagcgcgggttccttccggtattgtctccttccgtgtttcagttagcctcccccatctcccggtaccgcatgctatgcatcagctgctagcttatcaatagcctttggtggtggttgcagtaaagttctggaaacagcaatgtcgtagtacgatacaaaaagctcccatgagaatgagagcattaagcatagtccaccaggccgcaaagctggacagagaaagttcatacatatgcgatgtacaatgcgccttgtaaaaatcattgtgagcatgtggtctcatcacattggggtcgtgagtggtggaaccgggtttggtactagtcgttgatgaagtcgtacttgtcaccgtagttgtactagttgtcgcagtagtcgttgccttcacggtcgttgaggtgtgagtagagctagagggactcggtgtgctagcagtcgacgtatggttggaacttgccgctaccgataaaaccaaaagacctagtactagtgtgttccactccatggtggcctcgagatcccgggtgatcaagtcttcgtcgagtgattgtaaataaaatgtaatttacagtatagtattttaattaatatacaaatgatttgataataattcttatttaactataatatattgtgttgggttgaattaaaggtccgtatactagtatcgattcgcgacctactccggaatattaatagatcatggagataattaaaatgataaccatctcgcaaataaataagtattttactgttttcgtaacagttttgtaataaaaaaacctataaatattccggattattcataccgtcccaccatcgggcgcggatccgccaccatggaaaactggtccgctctggaactgctgcccaaggtcggaatccctaccgacttcctgacccacgtcaagacctccgctggcgaggaaatgttcgaggctctgaggatctactacggcgacgaccccgagcgttacaacatccacttcgaggctatcttcggcaccttctgcaaccgtctggaatgggtgtacttcctgacttccggcctggctgctgctgctcacgctatcaagttccacgacctgaacaagctgaccaccggcaagatgctgttccacgtgcaagtgccccgtgtggcttccggtgctggcctgcctacctcccgtcagaccaccatcatggtcaccaagtactccgagaagtcccccatcaccatccctttcgagctgtccgctgcttgcctgacttacctgcgtgaaaccttcgagggcaccatcctggacaagatcctgaacgtcgaggctatgcacaccgtgctgcgtgctctgaagaacaccgctgacgctatggaacgtggcctgatccacagcttcctccagaccctgctgaggaaggctcccccctacttcgtggtgcagaccctggtcgagaacgctaccctggctcgtcaggctctgaaccgtatccagcgctccaacatcctgcagtccttcaaggctaagatgctggctaccctgttcctgctgaaccgtacccgtgaccgtgactacgtgctgaagttcctgacccgtctggctgaggctgctaccgactccatcctcgacaaccctactacctacaccacctcctccggtgctaagatctccggtgtcatggtgtccaccgctaacgtgatgcagatcatcatgtccctgctgtcctcccacatcactaaggaaaccgtgtccgctcccgctacctacggcaacttcgtgctgtcccccgagaacgctgtgaccgctatctcctaccactctatcctggctgacttcaactcctacaaggctcacctgacctccggccagccccacctccccaacgactccctgagccaggctggtgctcactccctgacccccctgtccatggacgtgatccgtctgggcgaaaagaccgtgatcatggaaaacctgcgtcgcgtgtacaagaacaccgacaccaaggaccccctggaacgtaacgtggacctgaccttcttcttccccgtgggcctgtacctgcccgaggaccgtggttacaccaccgtcgagtccaaggtcaagctgaacgacaccgtgcgtaacgctctgcccaccaccgcttacctgctgaacagggaccgtgctgtgcaaaagatcgacttcgtggacgctctcaagaccctgtgccaccccgtgctgcacgagcctgctccatgcctgcaggctttcaccgagcgtggtcccccatccgagcccgctatgcagcgtctgctggaatgccgtttccagcaagagcccatgggtggtgctgctcgtcgtatcccccacttctaccgtgtgcgccgcgaggtgccccgtaccgtgaacgagatgaagcaggacttcgtggtcaccgacttctacaaggttggaaacatcaccctgtacaccgagctgcaccctttcttcgacttcacccactgccaagagaactccgagactgtggctctgtgcaccccccgtatcgtgatcggcaacctgcccgacggcctggctcccggtcccttccacgagctgaggacctgggagatcatggaacacatgcgcctgcgtcccccacccgactacgaggaaaccctgcgtctgttcaagaccaccgtgacctcccccaactaccccgagctgtgctacctggtggacgtgctggtgcacggcaacgctgacgctttcctgctgatccgcgctttcatcgctcgttgcatcgtgaacatgttccacacccgtcagctgctggtgttcgctcactcctacgctctggtcaccctgatcgctgagcacctggctgacggtgctctgcccccccagctcctgttccactaccgtaacctggtggctgtgctgcgcctggtcacccgtatctccgctctgcccggcctgaacaacggccagctggctgaggaacccctgtccgcttacgtgaacgctctgcacgaccacaggctgtggccccccttcgtgacccacctccctcgtaacatggaaggtgtccaggtggtggctgatcgtcagcccctgaaccccgctaacatcgaggctcgtcaccacggtgtctccgacgtgccccgtctgggtgctatggacgctgacgagcccctgttcgtggacgactaccgtgctaccgacgacgagtggaccctgcaaaaggtgttctacctgtgcctgatccccgctatgaccaacaaccgtgcttgcggcctgggcctgaacctcaagactctgctggtggacctgttctaccgtcccgccttcctgctcatgcccgctgctaccgctgtgtccacctccggcaccacctccaaggaatccacctctggtgtcacccccgaggactccgtggctgctcagcgtcaggctgtgggcgagatgctgaccgagctggtcgaggacgtggccaccgacgctcacacccctctgctgcaggcttgccgcgagctgttcctggctgtgcagttcgtgggcgagcacgtgaaggtgctggaagtgcgtgctcccctggaccacgctcagaggcagggactgcccgacttcatctcccgtcagcatgtgctgtacaacggttgctgcgtcgtgaccgctcctaagaccctgatcgagtactccctgcccgtgcccttccaccgtttctactccaaccccaccatctgcgctgctctgtccgacgacatcaagcgttacgtgaccgagttcccccactaccatagacacgatggtggtttccccctgcccaccgctttcgctcacgagtaccacaactggctgcgtagccccttctcccgttactccgctacctgccccaacgtgctgcactccgtgatgaccctggctgctatgctgtacaagatctcccccgtgtccctggtgctgcagaccaaggctcacatccaccccggtttcgctctgaccgctgtgcgtaccgacaccttcgaggtggacatgctgctgtactccggcaagtcctgcacctccgtcatcatcaacaaccccatcgtgaccaaggaagagagggacatctccaccacctaccacgtgacccagaacatcaacaccgtggacatgggcctgggttacacctccaacacttgcgtggcctacgtgaaccgcgtccgcaccgacatgggtgtccgtgtgcaggacctgttccgtgtgttccccatgaacgtgtaccgccacgatgaggtggaccgttggatcaggcacgctgctggcgtcgagcgtccccagctgctggacaccgagactatctccatgctgaccttcggttccatgtccgagcgcaacgctgctgctaccgtgcacggccagaaggctgtctgcgagctgatcctgacccctgtgactatggacgtgaactacttcaagatcaccaacaaccctcgtggtcgtgcttcctgcatgctgggcgtggacccctacgacaccgaggctgccaccaaggctatctacgaccaccgcgaggctgacgctcagaccttcgctgctacccacaacccatgggcttcccaggctggttgcctgtccgacgtcctgtacaacacccgtcaccgcgagcgtctgggctacaactccaagttctactccccctgcgctcagtacttcaacaccgaggaaatcatcgctgccaacaagaccctcttcaagaccatcgacgagtacctgctgcgcgctaaggactgcatccgtggcgacaccgacactcagtacgtgtgcgtcgagggaaccgagcagctgatcgagaacccttgccgtctgacccaagaggctctgcccatcctgtccaccaccaccctggctctgatggaaactaagctgaagggtggcgctggtgctttcgctacctccgagactcacttcggcaactacgtcgtgggagagatcatccccctgcagcagtccatgctgttcaacagctaagagctcaagcttgtcgagaagtactagaggatcataatcagccataccacatttgtagaggttttacttgctttaaaaaacctcccacacctccccctgaacctgaaacataaaatgaatgcaattgttgttgttaacttgtttattgcagcttataatggttacaaataaagcaatagcatcacaaatttcacaaataaagcatttttttcactgcattctagttgtggtttgtccaaactcatcaatgtatcttatcatgtctggatctgatcactgcttgagcctagaagatccggctgctaacaaagcccgaaaggaagctgagttggctgctgtggctagctttgtttaactttaagaaggagatacatctagaccggaatattaatagatcatggagataattaaaatgataaccatctcgcaaataaataagtattttactgttttcgtaacagttttgtaataaaaaaacctataaatattccggattattcataccgtcccaccatcgggcgcggatcccggtccgaagcgcgcggaattcaaaggcctacgtcgacgccaccatggaatcccgtggtcgtcgttgccccgagatgatctccgtgctgggtcccatctccggtcacgtcctgaaggctgtgttctcccgtggcgacacccccgtgctgccccacgaaactcgtctgctgcagaccggtatccacgtgcgtgtgtcccagccctccctgatcctggtgtcccagtacacccccgactccaccccttgccaccgcggagacaaccagctgcaggtccagcacacctacttcaccggttccgaggtcgagaacgtgtccgtgaacgtgcacaaccccaccggtcgttccatctgcccctcccaagagcccatgtccatctacgtgtacgctctgcccctgaagatgctgaacatcccctccatcaacgtgcaccactacccctccgctgctgagcgcaagcaccgtcacctccccgtggctgacgctgtgatccacgcttccggcaagcagatgtggcaggctcgtctgaccgtgtccggcctggcttggacccgtcagcagaaccagtggaaggaacccgacgtgtactacacctccgctttcgtgttccccaccaaggacgtggccctgcgtcacgtcgtgtgcgctcacgaactcgtgtgctccatggaaaacacccgtgctaccaagatgcaagtgatcggcgaccagtacgtgaaggtgtacctggaatccttctgcgaggacgtgccctccggcaagctgttcatgcacgtgaccctgggttccgacgtggaagaggacctgaccatgacccgtaacccccagcccttcatgcgtccccacgagcgtaacggtttcaccgtgctgtgccccaagaacatgatcatcaagcccggcaagatctcccacatcatgctggacgtggccttcacctcccacgagcacttcggcctgctgtgccctaagtccatccccggcctgtccatctccggcaacctgctgatgaacggccagcagatcttcctggaagtgcaggctatccgtgaaaccgtcgagctgcgtcagtacgaccctgtggctgctctgttcttcttcgacatcgacctgctgctgcagcgtggtccccagtactccgagcaccccaccttcaccagccagtaccgtatccagggcaagctggaataccgtcacacctgggaccgtcacgacgagggtgctgctcagggcgacgacgacgtgtggacctccggttccgactccgacgaggaactggtcaccaccgagcgcaagaccccccgtgtgaccggtggtggtgctatggctggtgcttccacctccgctggtcgcaagcgcaagtccgcttcctccgctaccgcttgcaccgctggtgtcatgacccgtggtcgcctgaaggctgagtccaccgtggctcccgaagaggacactgacgaggactccgacaacgagatccacaaccccgctgtgttcacctggcccccctggcaggctggtatcctggctcgtaacctggtgcccatggtggctaccgtgcagggccagaacctgaagtaccaagagttcttctgggacgccaacgacatctaccgtatcttcgctgagctggaaggcgtgtggcagcccgctgctcagcccaagcgtcgtcgtcaccgtcaggacgctctgcctggtccctgtatcgcttccacccccaagaagcaccgcggctaaaagcttgtcgagaagtactagaggatcataatcagccataccacatttgtagaggttttacttgctttaaaaaacctcccacacctccccctgaacctgaaacataaaatgaatgcaattgttgttgttaacttgtttattgcagcttataatggttacaaataaagcaatagcatcacaaatttcacaaataaagcatttttttcactgcattctagttgtggtttgtccaaactcatcaatgtatcttatcatgtctggatctgatcactgcttgagcctagaagatccggctgctaacaaagcccgaaaggaagctgagttggctgctgccaccgctgagcaataactatcataaccggaatattaatagatcatggagataattaaaatgataaccatctcgcaaataaataagtattttactgttttcgtaacagttttgtaataaaaaaacctataaatattccggattattcataccgtcccaccatcgggcgcggatcccggtccgaagcgcgcggaattcgccaccatgaccatggacgagcagcagccccaggctgtgacccccgtgtacgtgggcggtttcctggctcgttacgaccagtcccccgacgaggctgagctgctgctgccacgtgacgtggtcgaacactggctgcacgctcagggccagggacagccttccctgtccgtggctctgcccctgaacatcaaccacgacgacaccgctgtcgtgggtcacgtggccgctatgcagtccgtgcgtgacggcctgttctgcctgggttgcgtgacctccccccgtttcctggaaatcgtgcgtcgtgcttccgagaagtccgagctggtgtcccgtggtcccgtgtccccactgcagcccgacaaggtggtcgagttcctgtccggttcctacgctggcctgtccctgtcatcccgtcgttgcgacgacgtcgaggctgctacctccctgagcggctccgagactacccccttcaagcacgtggccctgtgctccgtgggtcgtaggcgtggaaccctggctgtgtacggtcgtgaccccgagtgggtcacccagcgtttccccgacctgaccgctgctgaccgtgacggactgcgtgctcagtggcagcgttgcggttccaccgctgtggacgcttccggcgaccccttccgttccgactcctacggcctgctgggcaactccgtggacgctctgtacatccgcgagcgtctgcccaagctgcgttacgacaagcagctcgtgggtgtcaccgagcgcgagtcctacgtgaaggcttccgtgtcccccgaggctgcttgcgacatcaaggctgcttccgctgagcgttctggcgacagccgctcccaggctgctactcctgctgctggtgctcgtgtgccctccagctccccatccccacctgtcgagcctccctcccccgtgcaacctcctgctctgcctgcttccccctccgtgctgcctgctgagtccagcccctccctgtcaccctctgagcctgctgaggctgcctccatgtcccaccctctgagcgctgctgtgactgctgctaccgctccccctggtgctactgtggctggtgcttcccccgctgtgccttccctggcttggcctcacgacggtgtctacctgcccaaggacgctttcttctccctgctgggcgcttcccgttccgctgctcccgtgatgtaccccggtgctgtggctgctccccccagcgcttcacctgctcctctgcccctgccctcctaccccgcttcctacggtgctcccgtcgtgggttacgaccagctggctgctcgtcacttcgctgactacgtggacccccactaccccggctggggtcgtcgttacgagcccgctccttccctgcacccatcctaccctgtgccccctcctccatcacccgcttactaccgtcgtcgtgactcccccggtggcatggacgagcctccatctggatgggagcgttacgacggttcccaccgtggccagtcccaaaagcagcaccgtcacggtggttccggtggtcacaacaagcgtcgcaaggaagccgctgctgcatcctccagctccgacgaggacctgagcttccccggcgaggctgaacacggtcgtgctcgcaagcgtctgaagtcccacgtgaactccgacggaggtagcggaggccacgctggttccaaccagcagcagcaacagcgctacgacgagctgcgtgacgctatccacgagctgaagcgtgacctgttcgctgctcgccagtcctccaccctgctgtctgctgctctgccagctgccgcttcttcctcccctaccaccaccaccgtgtgcacccctactggcgagctgacctctggtggtggcgagactcccaccgctctgctgtccggtggtgctaaggtggccgagcgtgctcaggctggtgtcgtgaacgcttcctgccgtctggctaccgcttccggttccgaggctgccaccgctggtccctctaccgctggttcctcatcctgcccagcttccgtggtgctggctgccgctgctgctcaagccgccgctgcttcacagtcccccccaaaggatatggtggacctgaaccgtcgtatcttcgtggctgctctgaacaagctcgagtaataaaagcttgtcgagaagtactagaggatcataatcagccataccacatttgtagaggttttacttgctttaaaaaacctcccacacctccccctgaacctgaaacataaaatgaatgcaattgttgttgttaacttgtttattgcagcttataatggttacaaataaagcaatagcatcacaaatttcacaaataaagcatttttttcactgcattctagttgtggtttgtccaaactcatcaatgtatcttatcatgtctggatctgatcactgcttgagcctagaagatccggctgctaacaaagcccgaaaggaagctgggaatattaatagatcatggagataattaaaatgataaccatctcgcaaataaataagtattttactgttttcgtaacagttttgtaataaaaaaacctataaatattccggattattcataccgtcccaccatcgggcgcggatccgccaccatggctgctatggaagctaacatcttctgcaccttcgaccacaagctgtctatcgctgacgtgggcaagctgaccaagctggtggctgctgtggtgcccatcccccagcgtctgcacctgatcaagcactaccagctgggcctgcaccagttcgtggaccacacccgtggttacgtgcgtctgcgtggcctgctgcgtaacatgaccctgaccctgatgcgtcgtgtcgagggcaaccagatcctgctgcacgtgcccacccacggcctgctgtacaccgtgctgaacaccggtcccgtgacctgggagaagggcgacgctctgtgcgtgctgccccccctgttccacggtcccctggctcgtgaaaacctgttgaccctgggccagtgggagctggtgctgccctggatcgtgcccatgcccctggctctggaaatcaaccagcgcctgctgatcatgggcctgttctccctggaccgttcctacgaagaagtgaaggctgctgtccagcagctgcagaccatcaccttccgtgacgctaccttcaccatccccgaccccgtgatcgaccagcacctcctgatcgacatgaagaccgcttgcctgtccatgtccatggtggctaacctggcttccgagctgaccatgacctacgtccgcaagctggctttggaggactcttccatgctgctggtcaagtgccaagagctgctgatgcgtctggaccgcgagcgttccgtgggcgagcctcgtactcccgctcgtcctcagcacgtgtcccccgacgacgagatcgctcgtctgtccgctctgttcgtgatgctgcgtcagctggacgacctgatccgcgagcaggtcgtgttcaccgtgtgcgacgtgagcccagacaacaagtccgctacctgcatcttcaagggctaaggcgcgccaagcttgtcgagaagtactagaggatcataatcagccataccacatttgtagaggttttacttgctttaaaaaacctcccacacctccccctgaacctgaaacataaaatgaatgcaattgttgttgttaacttgtttattgcagcttataatggttacaaataaagcaatagcatcacaaatttcacaaataaagcatttttttcactgcattctagttgtggtttgtccaaactcatcaatgtatcttatcatgtctggatctgatcactgcttgagcctagaagatccggctgctaacaaagcccgaaaggaagctgagttggctgctgccaccgctgagcaataactatcataacccctaggagatccgaaccagataagtgaaatctagttccaaactattttgtcatttttaattttcgtattagcttacgacgctacacccagttcccatctattttgtcactcttccctaaataatccttaaaaactccatttccacccctcccagttcccaactattttgtccgcccaca

SEQ ID NO: 69 - DNA, 14641 bp, Artificial Sequence
  Synthetic construct
ttgttccagtttggaacaagagtccactattaaagaacgtggactccaacgtcaaagggcgaaaaaccgtctatcagggcgatggcccactacgtgaaccatcaccctaatcaagttttttggggtcgaggtgccgtaaagcactaaatcggaaccctaaagggagcccccgatttagagcttgacggggaaagccggcgaacgtggcgagaaaggaagggaagaaagcgaaaggagcgggcgctagggcgctggcaagtgtagcggtcacgctgcgcgtaaccaccacacccgccgcgcttaatgcgccgctacagggcgcgtcgcgccattcgccattcaggctgcgcaactgttgggaagggcgatcggtgcgggcctcttcgctattacgccagctggcgaaagggggatgtgctgcaaggcgattaagttgggtaacgccagggttttcccagtcacgacgttgtaaaacgacggccagtgcatagaccagccgcgtaacctggcaaaatcggttacggttgagtaataaatggatgccctgcgtaagcgggtgtgggcggacaataaagtcttaaactgaacaaaatagatctaaactatgacaataaagtcttaaactagacagaatagttgtaaactgaaatcagtccagttatgctgtgaaaaagcatactggacttttgttatggctaaagcaaactcttcattttctgaagtgcaaattgcccgtcgtattaaagaggggcgtggccaagggcatggtaaagactatattcgcggcgttgtgacaatttaccgaacaactccgcggccgggaagccgatctcggcttgaacgaattgttaggtggcggtacttgggtcgatatcaaagtgcatcacttcttcccgtatgcccaactttgtatagagagccactgcgggatcgtcaccgtaatctgcttgcacgtagatcacataagcaccaagcgcgttggcctcatgcttgaggagattgatgagcgcggtggcaatgccctgcctccggtgctcgccggagactgcgagatcatagatatagatctcactacgcggctgctcaaacttgggcagaacgtaagccgcgagagcgccaacaaccgcttcttggtcgaaggcagcaagcgcgatgaatgtcttactacggagcaagttcccgaggtaatcggagtccggctgatgttgggagtaggtggctacgtctccgaactcacgaccgaaaagatcaagagcagcccgcatggatttgacttggtcagggccgagcctacatgtgcgaatgatgcccatacttgagccacctaactttgttttagggcgactgccctgctgcgtaacatcgttgctgctgcgtaacatcgttgctgctccataacatcaaacatcgacccacggcgtaacgcgcttgctgcttggatgcccgaggcatagactgtacaaaaaaacagtcataacaagccatgaaaaccgccactgcgccgttaccaccgctgcgttcggtcaaggttctggaccagttgcgtgagcgcatacgctacttgcattacagtttacgaaccgaacaggcttatgtcaactgggttcgtgccttcatccgtttccacggtgtgcgtcacccggcaaccttgggcagcagcgaagtcgaggcatttctgtcctggctggcgaacgagcgcaaggtttcggtctccacgcatcgtcaggcattggcggccttgctgttcttctacggcaaggtgctgtgcacggatctgcccttgcttcaggagatcggtagacctcggccgtcgcggcgcttgccggtggtgctgaccccggatgaagtggttcgcatcctcggttttctggaaggcgagcatcgtttgttcgcccaggactctagctatagttctagtggttggctacagctttgtttgtactatcaacaggttgaactgctgatcaacagatcctctacgcggccgcggtaccataacttcgtatagcatacattatacgaagttatctggtttaaacgtacccgtagtggctatggcagggcttgccgccccgacgttggctgcgagccctgggccttcacccgaacttgggggttggggtggggaaaaggaagaaacgcgggcgtattggtcccaatggggtctcggtggggtatcgacagagtgccagccctgggaccgaaccccgcgtttatgaacaaacgacccaacacccgtgcgttttattctgtctttttattgccgtcatagcgcgggttccttccggtattgtctccttccgtgtttcagttagcctcccccatctcccggtaccgcatgctatgcatcagctgctagcaccatggctcgagatcccgggtgatcaagtcttcgtcgagtgattgtaaataaaatgtaatttacagtatagtattttaattaatatacaaatgatttgataataattcttatttaactataatatattgtgttgggttgaattaaaggtccgtatactagtatcgattcgcgacctactccggaatattaatagatcatggagataattaaaatgataaccatctcgcaaataaataagtattttactgttttcgtaacagttttgtaataaaaaaacctataaatattccggattattcataccgtcccaccatcgggcgcggatccgccaccatggaaaactggtccgctctggaactgctgcccaaggtcggaatccctaccgacttcctgacccacgtcaagacctccgctggcgaggaaatgttcgaggctctgaggatctactacggcgacgaccccgagcgttacaacatccacttcgaggctatcttcggcaccttctgcaaccgtctggaatgggtgtacttcctgacttccggcctggctgctgctgctcacgctatcaagttccacgacctgaacaagctgaccaccggcaagatgctgttccacgtgcaagtgccccgtgtggcttccggtgctggcctgcctacctcccgtcagaccaccatcatggtcaccaagtactccgagaagtcccccatcaccatccctttcgagctgtccgctgcttgcctgacttacctgcgtgaaaccttcgagggcaccatcctggacaagatcctgaacgtcgaggctatgcacaccgtgctgcgtgctctgaagaacaccgctgacgctatggaacgtggcctgatccacagcttcctccagaccctgctgaggaaggctcccccctacttcgtggtgcagaccctggtcgagaacgctaccctggctcgtcaggctctgaaccgtatccagcgctccaacatcctgcagtccttcaaggctaagatgctggctaccctgttcctgctgaaccgtacccgtgaccgtgactacgtgctgaagttcctgacccgtctggctgaggctgctaccgactccatcctcgacaaccctactacctacaccacctcctccggtgctaagatctccggtgtcatggtgtccaccgctaacgtgatgcagatcatcatgtccctgctgtcctcccacatcactaaggaaaccgtgtccgctcccgctacctacggcaacttcgtgctgtcccccgagaacgctgtgaccgctatctcctaccactctatcctggctgacttcaactcctacaaggctcacctgacctccggccagccccacctccccaacgactccctgagccaggctggtgctcactccctgacccccctgtccatggacgtgatccgtctgggcgaaaagaccgtgatcatggaaaacctgcgtcgcgtgtacaagaacaccgacaccaaggaccccctggaacgtaacgtggacctgaccttcttcttccccgtgggcctgtacctgcccgaggaccgtggttacaccaccgtcgagtccaaggtcaagctgaacgacaccgtgcgtaacgctctgcccaccaccgcttacctgctgaacagggaccgtgctgtgcaaaagatcgacttcgtggacgctctcaagaccctgtgccaccccgtgctgcacgagcctgctccatgcctgcaggctttcaccgagcgtggtcccccatccgagcccgctatgcagcgtctgctggaatgccgtttccagcaagagcccatgggtggtgctgctcgtcgtatcccccacttctaccgtgtgcgccgcgaggtgccccgtaccgtgaacgagatgaagcaggacttcgtggtcaccgacttctacaaggttggaaacatcaccctgtacaccgagctgcaccctttcttcgacttcacccactgccaagagaactccgagactgtggctctgtgcaccccccgtatcgtgatcggcaacctgcccgacggcctggctcccggtcccttccacgagctgaggacctgggagatcatggaacacatgcgcctgcgtcccccacccgactacgaggaaaccctgcgtctgttcaagaccaccgtgacctcccccaactaccccgagctgtgctacctggtggacgtgctggtgcacggcaacgctgacgctttcctgctgatccgcgctttcatcgctcgttgcatcgtgaacatgttccacacccgtcagctgctggtgttcgctcactcctacgctctggtcaccctgatcgctgagcacctggctgacggtgctctgcccccccagctcctgttccactaccgtaacctggtggctgtgctgcgcctggtcacccgtatctccgctctgcccggcctgaacaacggccagctggctgaggaacccctgtccgcttacgtgaacgctctgcacgaccacaggctgtggccccccttcgtgacccacctccctcgtaacatggaaggtgtccaggtggtggctgatcgtcagcccctgaaccccgctaacatcgaggctcgtcaccacggtgtctccgacgtgccccgtctgggtgctatggacgctgacgagcccctgttcgtggacgactaccgtgctaccgacgacgagtggaccctgcaaaaggtgttctacctgtgcctgatccccgctatgaccaacaaccgtgcttgcggcctgggcctgaacctcaagactctgctggtggacctgttctaccgtcccgccttcctgctcatgcccgctgctaccgctgtgtccacctccggcaccacctccaaggaatccacctctggtgtcacccccgaggactccgtggctgctcagcgtcaggctgtgggcgagatgctgaccgagctggtcgaggacgtggccaccgacgctcacacccctctgctgcaggcttgccgcgagctgttcctggctgtgcagttcgtgggcgagcacgtgaaggtgctggaagtgcgtgctcccctggaccacgctcagaggcagggactgcccgacttcatctcccgtcagcatgtgctgtacaacggttgctgcgtcgtgaccgctcctaagaccctgatcgagtactccctgcccgtgcccttccaccgtttctactccaaccccaccatctgcgctgctctgtccgacgacatcaagcgttacgtgaccgagttcccccactaccatagacacgatggtggtttccccctgcccaccgctttcgctcacgagtaccacaactggctgcgtagccccttctcccgttactccgctacctgccccaacgtgctgcactccgtgatgaccctggctgctatgctgtacaagatctcccccgtgtccctggtgctgcagaccaaggctcacatccaccccggtttcgctctgaccgctgtgcgtaccgacaccttcgaggtggacatgctgctgtactccggcaagtcctgcacctccgtcatcatcaacaaccccatcgtgaccaaggaagagagggacatctccaccacctaccacgtgacccagaacatcaacaccgtggacatgggcctgggttacacctccaacacttgcgtggcctacgtgaaccgcgtccgcaccgacatgggtgtccgtgtgcaggacctgttccgtgtgttccccatgaacgtgtaccgccacgatgaggtggaccgttggatcaggcacgctgctggcgtcgagcgtccccagctgctggacaccgagactatctccatgctgaccttcggttccatgtccgagcgcaacgctgctgctaccgtgcacggccagaaggctgtctgcgagctgatcctgacccctgtgactatggacgtgaactacttcaagatcaccaacaaccctcgtggtcgtgcttcctgcatgctgggcgtggacccctacgacaccgaggctgccaccaaggctatctacgaccaccgcgaggctgacgctcagaccttcgctgctacccacaacccatgggcttcccaggctggttgcctgtccgacgtcctgtacaacacccgtcaccgcgagcgtctgggctacaactccaagttctactccccctgcgctcagtacttcaacaccgaggaaatcatcgctgccaacaagaccctcttcaagaccatcgacgagtacctgctgcgcgctaaggactgcatccgtggcgacaccgacactcagtacgtgtgcgtcgagggaaccgagcagctgatcgagaacccttgccgtctgacccaagaggctctgcccatcctgtccaccaccaccctggctctgatggaaactaagctgaagggtggcgctggtgctttcgctacctccgagactcacttcggcaactacgtcgtgggagagatcatccccctgcagcagtccatgctgttcaacagctaagagctcaagcttgtcgagaagtactagaggatcataatcagccataccacatttgtagaggttttacttgctttaaaaaacctcccacacctccccctgaacctgaaacataaaatgaatgcaattgttgttgttaacttgtttattgcagcttataatggttacaaataaagcaatagcatcacaaatttcacaaataaagcatttttttcactgcattctagttgtggtttgtccaaactcatcaatgtatcttatcatgtctggatctgatcactgcttgagcctagaagatccggctgctaacaaagcccgaaaggaagctgagttggctgctgtggctagctttgtttaactttaagaaggagatacatctagaccggaatattaatagatcatggagataattaaaatgataaccatctcgcaaataaataagtattttactgttttcgtaacagttttgtaataaaaaaacctataaatattccggattattcataccgtcccaccatcgggcgcggatcccggtccgaagcgcgcggaattcaaaggcctacgtcgacgccaccatggaatcccgtggtcgtcgttgccccgagatgatctccgtgctgggtcccatctccggtcacgtcctgaaggctgtgttctcccgtggcgacacccccgtgctgccccacgaaactcgtctgctgcagaccggtatccacgtgcgtgtgtcccagccctccctgatcctggtgtcccagtacacccccgactccaccccttgccaccgcggagacaaccagctgcaggtccagcacacctacttcaccggttccgaggtcgagaacgtgtccgtgaacgtgcacaaccccaccggtcgttccatctgcccctcccaagagcccatgtccatctacgtgtacgctctgcccctgaagatgctgaacatcccctccatcaacgtgcaccactacccctccgctgctgagcgcaagcaccgtcacctccccgtggctgacgctgtgatccacgcttccggcaagcagatgtggcaggctcgtctgaccgtgtccggcctggcttggacccgtcagcagaaccagtggaaggaacccgacgtgtactacacctccgctttcgtgttccccaccaaggacgtggccctgcgtcacgtcgtgtgcgctcacgaactcgtgtgctccatggaaaacacccgtgctaccaagatgcaagtgatcggcgaccagtacgtgaaggtgtacctggaatccttctgcgaggacgtgccctccggcaagctgttcatgcacgtgaccctgggttccgacgtggaagaggacctgaccatgacccgtaacccccagcccttcatgcgtccccacgagcgtaacggtttcaccgtgctgtgccccaagaacatgatcatcaagcccggcaagatctcccacatcatgctggacgtggccttcacctcccacgagcacttcggcctgctgtgccctaagtccatccccggcctgtccatctccggcaacctgctgatgaacggccagcagatcttcctggaagtgcaggctatccgtgaaaccgtcgagctgcgtcagtacgaccctgtggctgctctgttcttcttcgacatcgacctgctgctgcagcgtggtccccagtactccgagcaccccaccttcaccagccagtaccgtatccagggcaagctggaataccgtcacacctgggaccgtcacgacgagggtgctgctcagggcgacgacgacgtgtggacctccggttccgactccgacgaggaactggtcaccaccgagcgcaagaccccccgtgtgaccggtggtggtgctatggctggtgcttccacctccgctggtcgcaagcgcaagtccgcttcctccgctaccgcttgcaccgctggtgtcatgacccgtggtcgcctgaaggctgagtccaccgtggctcccgaagaggacactgacgaggactccgacaacgagatccacaaccccgctgtgttcacctggcccccctggcaggctggtatcctggctcgtaacctggtgcccatggtggctaccgtgcagggccagaacctgaagtaccaagagttcttctgggacgccaacgacatctaccgtatcttcgctgagctggaaggcgtgtggcagcccgctgctcagcccaagcgtcgtcgtcaccgtcaggacgctctgcctggtccctgtatcgcttccacccccaagaagcaccgcggctaaaagcttgtcgagaagtactagaggatcataatcagccataccacatttgtagaggttttacttgctttaaaaaacctcccacacctccccctgaacctgaaacataaaatgaatgcaattgttgttgttaacttgtttattgcagcttataatggttacaaataaagcaatagcatcacaaatttcacaaataaagcatttttttcactgcattctagttgtggtttgtccaaactcatcaatgtatcttatcatgtctggatctgatcactgcttgagcctagaagatccggctgctaacaaagcccgaaaggaagctgagttggctgctgccaccgctgagcaataactatcataaccggaatattaatagatcatggagataattaaaatgataaccatctcgcaaataaataagtattttactgttttcgtaacagttttgtaataaaaaaacctataaatattccggattattcataccgtcccaccatcgggcgcggatcccggtccgaagcgcgcggaattcgccaccatgaccatggacgagcagcagccccaggctgtgacccccgtgtacgtgggcggtttcctggctcgttacgaccagtcccccgacgaggctgagctgctgctgccacgtgacgtggtcgaacactggctgcacgctcagggccagggacagccttccctgtccgtggctctgcccctgaacatcaaccacgacgacaccgctgtcgtgggtcacgtggccgctatgcagtccgtgcgtgacggcctgttctgcctgggttgcgtgacctccccccgtttcctggaaatcgtgcgtcgtgcttccgagaagtccgagctggtgtcccgtggtcccgtgtccccactgcagcccgacaaggtggtcgagttcctgtccggttcctacgctggcctgtccctgtcatcccgtcgttgcgacgacgtcgaggctgctacctccctgagcggctccgagactacccccttcaagcacgtggccctgtgctccgtgggtcgtaggcgtggaaccctggctgtgtacggtcgtgaccccgagtgggtcacccagcgtttccccgacctgaccgctgctgaccgtgacggactgcgtgctcagtggcagcgttgcggttccaccgctgtggacgcttccggcgaccccttccgttccgactcctacggcctgctgggcaactccgtggacgctctgtacatccgcgagcgtctgcccaagctgcgttacgacaagcagctcgtgggtgtcaccgagcgcgagtcctacgtgaaggcttccgtgtcccccgaggctgcttgcgacatcaaggctgcttccgctgagcgttctggcgacagccgctcccaggctgctactcctgctgctggtgctcgtgtgccctccagctccccatccccacctgtcgagcctccctcccccgtgcaacctcctgctctgcctgcttccccctccgtgctgcctgctgagtccagcccctccctgtcaccctctgagcctgctgaggctgcctccatgtcccaccctctgagcgctgctgtgactgctgctaccgctccccctggtgctactgtggctggtgcttcccccgctgtgccttccctggcttggcctcacgacggtgtctacctgcccaaggacgctttcttctccctgctgggcgcttcccgttccgctgctcccgtgatgtaccccggtgctgtggctgctccccccagcgcttcacctgctcctctgcccctgccctcctaccccgcttcctacggtgctcccgtcgtgggttacgaccagctggctgctcgtcacttcgctgactacgtggacccccactaccccggctggggtcgtcgttacgagcccgctccttccctgcacccatcctaccctgtgccccctcctccatcacccgcttactaccgtcgtcgtgactcccccggtggcatggacgagcctccatctggatgggagcgttacgacggttcccaccgtggccagtcccaaaagcagcaccgtcacggtggttccggtggtcacaacaagcgtcgcaaggaagccgctgctgcatcctccagctccgacgaggacctgagcttccccggcgaggctgaacacggtcgtgctcgcaagcgtctgaagtcccacgtgaactccgacggaggtagcggaggccacgctggttccaaccagcagcagcaacagcgctacgacgagctgcgtgacgctatccacgagctgaagcgtgacctgttcgctgctcgccagtcctccaccctgctgtctgctgctctgccagctgccgcttcttcctcccctaccaccaccaccgtgtgcacccctactggcgagctgacctctggtggtggcgagactcccaccgctctgctgtccggtggtgctaaggtggccgagcgtgctcaggctggtgtcgtgaacgcttcctgccgtctggctaccgcttccggttccgaggctgccaccgctggtccctctaccgctggttcctcatcctgcccagcttccgtggtgctggctgccgctgctgctcaagccgccgctgcttcacagtcccccccaaaggatatggtggacctgaaccgtcgtatcttcgtggctgctctgaacaagctcgagtaataaaagcttgtcgagaagtactagaggatcataatcagccataccacatttgtagaggttttacttgctttaaaaaacctcccacacctccccctgaacctgaaacataaaatgaatgcaattgttgttgttaacttgtttattgcagcttataatggttacaaataaagcaatagcatcacaaatttcacaaataaagcatttttttcactgcattctagttgtggtttgtccaaactcatcaatgtatcttatcatgtctggatctgatcactgcttgagcctagaagatccggctgctaacaaagcccgaaaggaagctgggaatattaatagatcatggagataattaaaatgataaccatctcgcaaataaataagtattttactgttttcgtaacagttttgtaataaaaaaacctataaatattccggattattcataccgtcccaccatcgggcgcggatccgccaccatggctgctatggaagctaacatcttctgcaccttcgaccacaagctgtctatcgctgacgtgggcaagctgaccaagctggtggctgctgtggtgcccatcccccagcgtctgcacctgatcaagcactaccagctgggcctgcaccagttcgtggaccacacccgtggttacgtgcgtctgcgtggcctgctgcgtaacatgaccctgaccctgatgcgtcgtgtcgagggcaaccagatcctgctgcacgtgcccacccacggcctgctgtacaccgtgctgaacaccggtcccgtgacctgggagaagggcgacgctctgtgcgtgctgccccccctgttccacggtcccctggctcgtgaaaacctgttgaccctgggccagtgggagctggtgctgccctggatcgtgcccatgcccctggctctggaaatcaaccagcgcctgctgatcatgggcctgttctccctggaccgttcctacgaagaagtgaaggctgctgtccagcagctgcagaccatcaccttccgtgacgctaccttcaccatccccgaccccgtgatcgaccagcacctcctgatcgacatgaagaccgcttgcctgtccatgtccatggtggctaacctggcttccgagctgaccatgacctacgtccgcaagctggctttggaggactcttccatgctgctggtcaagtgccaagagctgctgatgcgtctggaccgcgagcgttccgtgggcgagcctcgtactcccgctcgtcctcagcacgtgtcccccgacgacgagatcgctcgtctgtccgctctgttcgtgatgctgcgtcagctggacgacctgatccgcgagcaggtcgtgttcaccgtgtgcgacgtgagcccagacaacaagtccgctacctgcatcttcaagggctaaggcgcgccaagcttgtcgagaagtactagaggatcataatcagccataccacatttgtagaggttttacttgctttaaaaaacctcccacacctccccctgaacctgaaacataaaatgaatgcaattgttgttgttaacttgtttattgcagcttataatggttacaaataaagcaatagcatcacaaatttcacaaataaagcatttttttcactgcattctagttgtggtttgtccaaactcatcaatgtatcttatcatgtctggatctgatcactgcttgagcctagaagatccggctgctaacaaagcccgaaaggaagctgagttggctgctgctgagtagtgcgcgagcaaaatttaagctacaacaaggcacgcgtccggaatattaatagatcatggagataattaaaatgataaccatctcgcaaataaataagtattttactgttttcgtaacagttttgtaataaaaaaacctataaatattccggattattcataccgtcccaccatcgggcgcggatcccggtccgaagcgcgcggaattcaaaggcctacatggagtggaacacactagtactaggtcttttggttttatcggtagcggcaagttccaaccatacgtcgactgctagcacaccgagtccctctagctctactcacacctcaacgaccgtgaaggcaacgactactgcgacaactagtacaactacggtgacaagtacgacttcatcaacgactagtaccaaacccggttccaccactcacgaccccaatgtgatgagaccacatgctcacaatgatttttacaaggcgcattgtacatcgcatatgtatgaactttctctgtccagctttgcggcctggtggactatgcttaatgctctcattctcatgggagctttttgtatcgtactacgacattgctgtttccagaactttactgcaaccaccaccaaaggctattgataaaagcttgtcgagaagtactagaggatcataatcagccataccacatttgtagaggttttacttgctttaaaaaacctcccacacctccccctgaacctgaaacataaaatgaatgcaattgttgttgttaacttgtttattgcagcttataatggttacaaataaagcaatagcatcacaaatttcacaaataaagcatttttttcactgcattctagttgtggtttgtccaaactcatcaatgtatcttatcatgtctggatctgatcactgcttgagcctagaagatccggctgctaacaaagcccgaaaggaagctgagttggctgctgccaccgctgagcaataactatcataacccctaggagatccgaaccagataagtgaaatctagttccaaactattttgtcatttttaattttcgtattagcttacgacgctacacccagttcccatctattttgtcactcttccctaaataatccttaaaaactccatttccacccctcccagttcccaactattttgtccgcccaca

SEQ ID NO: 70 - DNA, 14787 bp, Artificial Sequence
  Synthetic construct
ttgttccagtttggaacaagagtccactattaaagaacgtggactccaacgtcaaagggcgaaaaaccgtctatcagggcgatggcccactacgtgaaccatcaccctaatcaagttttttggggtcgaggtgccgtaaagcactaaatcggaaccctaaagggagcccccgatttagagcttgacggggaaagccggcgaacgtggcgagaaaggaagggaagaaagcgaaaggagcgggcgctagggcgctggcaagtgtagcggtcacgctgcgcgtaaccaccacacccgccgcgcttaatgcgccgctacagggcgcgtcgcgccattcgccattcaggctgcgcaactgttgggaagggcgatcggtgcgggcctcttcgctattacgccagctggcgaaagggggatgtgctgcaaggcgattaagttgggtaacgccagggttttcccagtcacgacgttgtaaaacgacggccagtgcatagaccagccgcgtaacctggcaaaatcggttacggttgagtaataaatggatgccctgcgtaagcgggtgtgggcggacaataaagtcttaaactgaacaaaatagatctaaactatgacaataaagtcttaaactagacagaatagttgtaaactgaaatcagtccagttatgctgtgaaaaagcatactggacttttgttatggctaaagcaaactcttcattttctgaagtgcaaattgcccgtcgtattaaagaggggcgtggccaagggcatggtaaagactatattcgcggcgttgtgacaatttaccgaacaactccgcggccgggaagccgatctcggcttgaacgaattgttaggtggcggtacttgggtcgatatcaaagtgcatcacttcttcccgtatgcccaactttgtatagagagccactgcgggatcgtcaccgtaatctgcttgcacgtagatcacataagcaccaagcgcgttggcctcatgcttgaggagattgatgagcgcggtggcaatgccctgcctccggtgctcgccggagactgcgagatcatagatatagatctcactacgcggctgctcaaacttgggcagaacgtaagccgcgagagcgccaacaaccgcttcttggtcgaaggcagcaagcgcgatgaatgtcttactacggagcaagttcccgaggtaatcggagtccggctgatgttgggagtaggtggctacgtctccgaactcacgaccgaaaagatcaagagcagcccgcatggatttgacttggtcagggccgagcctacatgtgcgaatgatgcccatacttgagccacctaactttgttttagggcgactgccctgctgcgtaacatcgttgctgctgcgtaacatcgttgctgctccataacatcaaacatcgacccacggcgtaacgcgcttgctgcttggatgcccgaggcatagactgtacaaaaaaacagtcataacaagccatgaaaaccgccactgcgccgttaccaccgctgcgttcggtcaaggttctggaccagttgcgtgagcgcatacgctacttgcattacagtttacgaaccgaacaggcttatgtcaactgggttcgtgccttcatccgtttccacggtgtgcgtcacccggcaaccttgggcagcagcgaagtcgaggcatttctgtcctggctggcgaacgagcgcaaggtttcggtctccacgcatcgtcaggcattggcggccttgctgttcttctacggcaaggtgctgtgcacggatctgcccttgcttcaggagatcggtagacctcggccgtcgcggcgcttgccggtggtgctgaccccggatgaagtggttcgcatcctcggttttctggaaggcgagcatcgtttgttcgcccaggactctagctatagttctagtggttggctacagctttgtttgtactatcaacaggttgaactgctgatcaacagatcctctacgcggccgcggtaccataacttcgtatagcatacattatacgaagttatctggtttaaacgtacccgtagtggctatggcagggcttgccgccccgacgttggctgcgagccctgggccttcacccgaacttgggggttggggtggggaaaaggaagaaacgcgggcgtattggtcccaatggggtctcggtggggtatcgacagagtgccagccctgggaccgaaccccgcgtttatgaacaaacgacccaacacccgtgcgttttattctgtctttttattgccgtcatagcgcgggttccttccggtattgtctccttccgtgtttcagttagcctcccccatctcccggtaccgcatgctatgcatcagctgctagcttaggcgtcctcgaagtcctcgtcgtcgtcgtcgtcctcctcctcgcgcaggcggcgggactccagggagtcgtggtgggacagggcggccacctcctcgccggaggcggtggccagggcctggtacttcacggagccggagccgcggccgcggaagtagcgcacggcgcggcaggtggtgaacatggcccagatgaagaacagcatgccgaaggaccaggagatgccggtgcggtactcgttggacaggaaggtgtcgtactgcacgatggggtagatcaggccgcacaggccgaagaaggcgcccaggtggtagccgaactgcaccttcacgtactggaagaacacggcctcgatcagcaggaagtagatgatggagatgatggcgtacaccacgaacacggccagcaccatgtggccggtgcgcacgaagaagttgttgccgaagccgtagcacagggccatggccaccacggtggtgttgaagcccagggccacctccaccaggttcacgatcagggtgcggaactgcacggtgcccttcagcttggggtgcaggcgggagaagaagaacagggagcgcttgtaggagcggtactgggtcaccatggacacgttgaagatggtcaggcagaagaagtgcacggcggccatgaaggcgatcatggagggcaggcggaaggacatggtcagggtgaacagctggaaggtgtccatggacaggatgaacaggaaggcggtcagggagtcgcccatgtaggagatgtcgcgggtggactggttcagggacatgcccttgtccttgcgcatggagatcttgatccagcacaccaggtagtagatggtcacggccaggaacaccagctgcatgaacacggcgtagcacaccagctgcacggagtccaggaacagcatgggggtgtgcaggtgcatcacgttgtaggcggacatgttcaggcgctcgaagtccaccacgtggtagtacacgcaggggtagcccaggtgggggaagttggacagcaccaggtgcacggacacgttcacgaaggtcagcaccatgaacacgatggaggcggaccaggtgcgggtgttcaccttgtccacgtgggagggggccatggtggcctcgagatcccgggtgatcaagtcttcgtcgagtgattgtaaataaaatgtaatttacagtatagtattttaattaatatacaaatgatttgataataattcttatttaactataatatattgtgttgggttgaattaaaggtccgtatactagtatcgattcgcgacctactccggaatattaatagatcatggagataattaaaatgataaccatctcgcaaataaataagtattttactgttttcgtaacagttttgtaataaaaaaacctataaatattccggattattcataccgtcccaccatcgggcgcggatccgccaccatggaaaactggtccgctctggaactgctgcccaaggtcggaatccctaccgacttcctgacccacgtcaagacctccgctggcgaggaaatgttcgaggctctgaggatctactacggcgacgaccccgagcgttacaacatccacttcgaggctatcttcggcaccttctgcaaccgtctggaatgggtgtacttcctgacttccggcctggctgctgctgctcacgctatcaagttccacgacctgaacaagctgaccaccggcaagatgctgttccacgtgcaagtgccccgtgtggcttccggtgctggcctgcctacctcccgtcagaccaccatcatggtcaccaagtactccgagaagtcccccatcaccatccctttcgagctgtccgctgcttgcctgacttacctgcgtgaaaccttcgagggcaccatcctggacaagatcctgaacgtcgaggctatgcacaccgtgctgcgtgctctgaagaacaccgctgacgctatggaacgtggcctgatccacagcttcctccagaccctgctgaggaaggctcccccctacttcgtggtgcagaccctggtcgagaacgctaccctggctcgtcaggctctgaaccgtatccagcgctccaacatcctgcagtccttcaaggctaagatgctggctaccctgttcctgctgaaccgtacccgtgaccgtgactacgtgctgaagttcctgacccgtctggctgaggctgctaccgactccatcctcgacaaccctactacctacaccacctcctccggtgctaagatctccggtgtcatggtgtccaccgctaacgtgatgcagatcatcatgtccctgctgtcctcccacatcactaaggaaaccgtgtccgctcccgctacctacggcaacttcgtgctgtcccccgagaacgctgtgaccgctatctcctaccactctatcctggctgacttcaactcctacaaggctcacctgacctccggccagccccacctccccaacgactccctgagccaggctggtgctcactccctgacccccctgtccatggacgtgatccgtctgggcgaaaagaccgtgatcatggaaaacctgcgtcgcgtgtacaagaacaccgacaccaaggaccccctggaacgtaacgtggacctgaccttcttcttccccgtgggcctgtacctgcccgaggaccgtggttacaccaccgtcgagtccaaggtcaagctgaacgacaccgtgcgtaacgctctgcccaccaccgcttacctgctgaacagggaccgtgctgtgcaaaagatcgacttcgtggacgctctcaagaccctgtgccaccccgtgctgcacgagcctgctccatgcctgcaggctttcaccgagcgtggtcccccatccgagcccgctatgcagcgtctgctggaatgccgtttccagcaagagcccatgggtggtgctgctcgtcgtatcccccacttctaccgtgtgcgccgcgaggtgccccgtaccgtgaacgagatgaagcaggacttcgtggtcaccgacttctacaaggttggaaacatcaccctgtacaccgagctgcaccctttcttcgacttcacccactgccaagagaactccgagactgtggctctgtgcaccccccgtatcgtgatcggcaacctgcccgacggcctggctcccggtcccttccacgagctgaggacctgggagatcatggaacacatgcgcctgcgtcccccacccgactacgaggaaaccctgcgtctgttcaagaccaccgtgacctcccccaactaccccgagctgtgctacctggtggacgtgctggtgcacggcaacgctgacgctttcctgctgatccgcgctttcatcgctcgttgcatcgtgaacatgttccacacccgtcagctgctggtgttcgctcactcctacgctctggtcaccctgatcgctgagcacctggctgacggtgctctgcccccccagctcctgttccactaccgtaacctggtggctgtgctgcgcctggtcacccgtatctccgctctgcccggcctgaacaacggccagctggctgaggaacccctgtccgcttacgtgaacgctctgcacgaccacaggctgtggccccccttcgtgacccacctccctcgtaacatggaaggtgtccaggtggtggctgatcgtcagcccctgaaccccgctaacatcgaggctcgtcaccacggtgtctccgacgtgccccgtctgggtgctatggacgctgacgagcccctgttcgtggacgactaccgtgctaccgacgacgagtggaccctgcaaaaggtgttctacctgtgcctgatccccgctatgaccaacaaccgtgcttgcggcctgggcctgaacctcaagactctgctggtggacctgttctaccgtcccgccttcctgctcatgcccgctgctaccgctgtgtccacctccggcaccacctccaaggaatccacctctggtgtcacccccgaggactccgtggctgctcagcgtcaggctgtgggcgagatgctgaccgagctggtcgaggacgtggccaccgacgctcacacccctctgctgcaggcttgccgcgagctgttcctggctgtgcagttcgtgggcgagcacgtgaaggtgctggaagtgcgtgctcccctggaccacgctcagaggcagggactgcccgacttcatctcccgtcagcatgtgctgtacaacggttgctgcgtcgtgaccgctcctaagaccctgatcgagtactccctgcccgtgcccttccaccgtttctactccaaccccaccatctgcgctgctctgtccgacgacatcaagcgttacgtgaccgagttcccccactaccatagacacgatggtggtttccccctgcccaccgctttcgctcacgagtaccacaactggctgcgtagccccttctcccgttactccgctacctgccccaacgtgctgcactccgtgatgaccctggctgctatgctgtacaagatctcccccgtgtccctggtgctgcagaccaaggctcacatccaccccggtttcgctctgaccgctgtgcgtaccgacaccttcgaggtggacatgctgctgtactccggcaagtcctgcacctccgtcatcatcaacaaccccatcgtgaccaaggaagagagggacatctccaccacctaccacgtgacccagaacatcaacaccgtggacatgggcctgggttacacctccaacacttgcgtggcctacgtgaaccgcgtccgcaccgacatgggtgtccgtgtgcaggacctgttccgtgtgttccccatgaacgtgtaccgccacgatgaggtggaccgttggatcaggcacgctgctggcgtcgagcgtccccagctgctggacaccgagactatctccatgctgaccttcggttccatgtccgagcgcaacgctgctgctaccgtgcacggccagaaggctgtctgcgagctgatcctgacccctgtgactatggacgtgaactacttcaagatcaccaacaaccctcgtggtcgtgcttcctgcatgctgggcgtggacccctacgacaccgaggctgccaccaaggctatctacgaccaccgcgaggctgacgctcagaccttcgctgctacccacaacccatgggcttcccaggctggttgcctgtccgacgtcctgtacaacacccgtcaccgcgagcgtctgggctacaactccaagttctactccccctgcgctcagtacttcaacaccgaggaaatcatcgctgccaacaagaccctcttcaagaccatcgacgagtacctgctgcgcgctaaggactgcatccgtggcgacaccgacactcagtacgtgtgcgtcgagggaaccgagcagctgatcgagaacccttgccgtctgacccaagaggctctgcccatcctgtccaccaccaccctggctctgatggaaactaagctgaagggtggcgctggtgctttcgctacctccgagactcacttcggcaactacgtcgtgggagagatcatccccctgcagcagtccatgctgttcaacagctaagagctcaagcttgtcgagaagtactagaggatcataatcagccataccacatttgtagaggttttacttgctttaaaaaacctcccacacctccccctgaacctgaaacataaaatgaatgcaattgttgttgttaacttgtttattgcagcttataatggttacaaataaagcaatagcatcacaaatttcacaaataaagcatttttttcactgcattctagttgtggtttgtccaaactcatcaatgtatcttatcatgtctggatctgatcactgcttgagcctagaagatccggctgctaacaaagcccgaaaggaagctgagttggctgctgtggctagctttgtttaactttaagaaggagatacatctagaccggaatattaatagatcatggagataattaaaatgataaccatctcgcaaataaataagtattttactgttttcgtaacagttttgtaataaaaaaacctataaatattccggattattcataccgtcccaccatcgggcgcggatcccggtccgaagcgcgcggaattcaaaggcctacgtcgacgccaccatggaatcccgtggtcgtcgttgccccgagatgatctccgtgctgggtcccatctccggtcacgtcctgaaggctgtgttctcccgtggcgacacccccgtgctgccccacgaaactcgtctgctgcagaccggtatccacgtgcgtgtgtcccagccctccctgatcctggtgtcccagtacacccccgactccaccccttgccaccgcggagacaaccagctgcaggtccagcacacctacttcaccggttccgaggtcgagaacgtgtccgtgaacgtgcacaaccccaccggtcgttccatctgcccctcccaagagcccatgtccatctacgtgtacgctctgcccctgaagatgctgaacatcccctccatcaacgtgcaccactacccctccgctgctgagcgcaagcaccgtcacctccccgtggctgacgctgtgatccacgcttccggcaagcagatgtggcaggctcgtctgaccgtgtccggcctggcttggacccgtcagcagaaccagtggaaggaacccgacgtgtactacacctccgctttcgtgttccccaccaaggacgtggccctgcgtcacgtcgtgtgcgctcacgaactcgtgtgctccatggaaaacacccgtgctaccaagatgcaagtgatcggcgaccagtacgtgaaggtgtacctggaatccttctgcgaggacgtgccctccggcaagctgttcatgcacgtgaccctgggttccgacgtggaagaggacctgaccatgacccgtaacccccagcccttcatgcgtccccacgagcgtaacggtttcaccgtgctgtgccccaagaacatgatcatcaagcccggcaagatctcccacatcatgctggacgtggccttcacctcccacgagcacttcggcctgctgtgccctaagtccatccccggcctgtccatctccggcaacctgctgatgaacggccagcagatcttcctggaagtgcaggctatccgtgaaaccgtcgagctgcgtcagtacgaccctgtggctgctctgttcttcttcgacatcgacctgctgctgcagcgtggtccccagtactccgagcaccccaccttcaccagccagtaccgtatccagggcaagctggaataccgtcacacctgggaccgtcacgacgagggtgctgctcagggcgacgacgacgtgtggacctccggttccgactccgacgaggaactggtcaccaccgagcgcaagaccccccgtgtgaccggtggtggtgctatggctggtgcttccacctccgctggtcgcaagcgcaagtccgcttcctccgctaccgcttgcaccgctggtgtcatgacccgtggtcgcctgaaggctgagtccaccgtggctcccgaagaggacactgacgaggactccgacaacgagatccacaaccccgctgtgttcacctggcccccctggcaggctggtatcctggctcgtaacctggtgcccatggtggctaccgtgcagggccagaacctgaagtaccaagagttcttctgggacgccaacgacatctaccgtatcttcgctgagctggaaggcgtgtggcagcccgctgctcagcccaagcgtcgtcgtcaccgtcaggacgctctgcctggtccctgtatcgcttccacccccaagaagcaccgcggctaaaagcttgtcgagaagtactagaggatcataatcagccataccacatttgtagaggttttacttgctttaaaaaacctcccacacctccccctgaacctgaaacataaaatgaatgcaattgttgttgttaacttgtttattgcagcttataatggttacaaataaagcaatagcatcacaaatttcacaaataaagcatttttttcactgcattctagttgtggtttgtccaaactcatcaatgtatcttatcatgtctggatctgatcactgcttgagcctagaagatccggctgctaacaaagcccgaaaggaagctgagttggctgctgccaccgctgagcaataactatcataaccggaatattaatagatcatggagataattaaaatgataaccatctcgcaaataaataagtattttactgttttcgtaacagttttgtaataaaaaaacctataaatattccggattattcataccgtcccaccatcgggcgcggatcccggtccgaagcgcgcggaattcgccaccatgaccatggacgagcagcagccccaggctgtgacccccgtgtacgtgggcggtttcctggctcgttacgaccagtcccccgacgaggctgagctgctgctgccacgtgacgtggtcgaacactggctgcacgctcagggccagggacagccttccctgtccgtggctctgcccctgaacatcaaccacgacgacaccgctgtcgtgggtcacgtggccgctatgcagtccgtgcgtgacggcctgttctgcctgggttgcgtgacctccccccgtttcctggaaatcgtgcgtcgtgcttccgagaagtccgagctggtgtcccgtggtcccgtgtccccactgcagcccgacaaggtggtcgagttcctgtccggttcctacgctggcctgtccctgtcatcccgtcgttgcgacgacgtcgaggctgctacctccctgagcggctccgagactacccccttcaagcacgtggccctgtgctccgtgggtcgtaggcgtggaaccctggctgtgtacggtcgtgaccccgagtgggtcacccagcgtttccccgacctgaccgctgctgaccgtgacggactgcgtgctcagtggcagcgttgcggttccaccgctgtggacgcttccggcgaccccttccgttccgactcctacggcctgctgggcaactccgtggacgctctgtacatccgcgagcgtctgcccaagctgcgttacgacaagcagctcgtgggtgtcaccgagcgcgagtcctacgtgaaggcttccgtgtcccccgaggctgcttgcgacatcaaggctgcttccgctgagcgttctggcgacagccgctcccaggctgctactcctgctgctggtgctcgtgtgccctccagctccccatccccacctgtcgagcctccctcccccgtgcaacctcctgctctgcctgcttccccctccgtgctgcctgctgagtccagcccctccctgtcaccctctgagcctgctgaggctgcctccatgtcccaccctctgagcgctgctgtgactgctgctaccgctccccctggtgctactgtggctggtgcttcccccgctgtgccttccctggcttggcctcacgacggtgtctacctgcccaaggacgctttcttctccctgctgggcgcttcccgttccgctgctcccgtgatgtaccccggtgctgtggctgctccccccagcgcttcacctgctcctctgcccctgccctcctaccccgcttcctacggtgctcccgtcgtgggttacgaccagctggctgctcgtcacttcgctgactacgtggacccccactaccccggctggggtcgtcgttacgagcccgctccttccctgcacccatcctaccctgtgccccctcctccatcacccgcttactaccgtcgtcgtgactcccccggtggcatggacgagcctccatctggatgggagcgttacgacggttcccaccgtggccagtcccaaaagcagcaccgtcacggtggttccggtggtcacaacaagcgtcgcaaggaagccgctgctgcatcctccagctccgacgaggacctgagcttccccggcgaggctgaacacggtcgtgctcgcaagcgtctgaagtcccacgtgaactccgacggaggtagcggaggccacgctggttccaaccagcagcagcaacagcgctacgacgagctgcgtgacgctatccacgagctgaagcgtgacctgttcgctgctcgccagtcctccaccctgctgtctgctgctctgccagctgccgcttcttcctcccctaccaccaccaccgtgtgcacccctactggcgagctgacctctggtggtggcgagactcccaccgctctgctgtccggtggtgctaaggtggccgagcgtgctcaggctggtgtcgtgaacgcttcctgccgtctggctaccgcttccggttccgaggctgccaccgctggtccctctaccgctggttcctcatcctgcccagcttccgtggtgctggctgccgctgctgctcaagccgccgctgcttcacagtcccccccaaaggatatggtggacctgaaccgtcgtatcttcgtggctgctctgaacaagctcgagtaataaaagcttgtcgagaagtactagaggatcataatcagccataccacatttgtagaggttttacttgctttaaaaaacctcccacacctccccctgaacctgaaacataaaatgaatgcaattgttgttgttaacttgtttattgcagcttataatggttacaaataaagcaatagcatcacaaatttcacaaataaagcatttttttcactgcattctagttgtggtttgtccaaactcatcaatgtatcttatcatgtctggatctgatcactgcttgagcctagaagatccggctgctaacaaagcccgaaaggaagctgggaatattaatagatcatggagataattaaaatgataaccatctcgcaaataaataagtattttactgttttcgtaacagttttgtaataaaaaaacctataaatattccggattattcataccgtcccaccatcgggcgcggatccgccaccatggctgctatggaagctaacatcttctgcaccttcgaccacaagctgtctatcgctgacgtgggcaagctgaccaagctggtggctgctgtggtgcccatcccccagcgtctgcacctgatcaagcactaccagctgggcctgcaccagttcgtggaccacacccgtggttacgtgcgtctgcgtggcctgctgcgtaacatgaccctgaccctgatgcgtcgtgtcgagggcaaccagatcctgctgcacgtgcccacccacggcctgctgtacaccgtgctgaacaccggtcccgtgacctgggagaagggcgacgctctgtgcgtgctgccccccctgttccacggtcccctggctcgtgaaaacctgttgaccctgggccagtgggagctggtgctgccctggatcgtgcccatgcccctggctctggaaatcaaccagcgcctgctgatcatgggcctgttctccctggaccgttcctacgaagaagtgaaggctgctgtccagcagctgcagaccatcaccttccgtgacgctaccttcaccatccccgaccccgtgatcgaccagcacctcctgatcgacatgaagaccgcttgcctgtccatgtccatggtggctaacctggcttccgagctgaccatgacctacgtccgcaagctggctttggaggactcttccatgctgctggtcaagtgccaagagctgctgatgcgtctggaccgcgagcgttccgtgggcgagcctcgtactcccgctcgtcctcagcacgtgtcccccgacgacgagatcgctcgtctgtccgctctgttcgtgatgctgcgtcagctggacgacctgatccgcgagcaggtcgtgttcaccgtgtgcgacgtgagcccagacaacaagtccgctacctgcatcttcaagggctaaggcgcgccaagcttgtcgagaagtactagaggatcataatcagccataccacatttgtagaggttttacttgctttaaaaaacctcccacacctccccctgaacctgaaacataaaatgaatgcaattgttgttgttaacttgtttattgcagcttataatggttacaaataaagcaatagcatcacaaatttcacaaataaagcatttttttcactgcattctagttgtggtttgtccaaactcatcaatgtatcttatcatgtctggatctgatcactgcttgagcctagaagatccggctgctaacaaagcccgaaaggaagctgagttggctgctgccaccgctgagcaataactatcataacccctaggagatccgaaccagataagtgaaatctagttccaaactattttgtcatttttaattttcgtattagcttacgacgctacacccagttcccatctattttgtcactcttccctaaataatccttaaaaactccatttccacccctcccagttcccaactattttgtccgcccaca

SEQ ID NO: 71 - DNA, 15346 bp, Artificial Sequence
  Synthetic construct
ttgttccagtttggaacaagagtccactattaaagaacgtggactccaacgtcaaagggcgaaaaaccgtctatcagggcgatggcccactacgtgaaccatcaccctaatcaagttttttggggtcgaggtgccgtaaagcactaaatcggaaccctaaagggagcccccgatttagagcttgacggggaaagccggcgaacgtggcgagaaaggaagggaagaaagcgaaaggagcgggcgctagggcgctggcaagtgtagcggtcacgctgcgcgtaaccaccacacccgccgcgcttaatgcgccgctacagggcgcgtcgcgccattcgccattcaggctgcgcaactgttgggaagggcgatcggtgcgggcctcttcgctattacgccagctggcgaaagggggatgtgctgcaaggcgattaagttgggtaacgccagggttttcccagtcacgacgttgtaaaacgacggccagtgcatagaccagccgcgtaacctggcaaaatcggttacggttgagtaataaatggatgccctgcgtaagcgggtgtgggcggacaataaagtcttaaactgaacaaaatagatctaaactatgacaataaagtcttaaactagacagaatagttgtaaactgaaatcagtccagttatgctgtgaaaaagcatactggacttttgttatggctaaagcaaactcttcattttctgaagtgcaaattgcccgtcgtattaaagaggggcgtggccaagggcatggtaaagactatattcgcggcgttgtgacaatttaccgaacaactccgcggccgggaagccgatctcggcttgaacgaattgttaggtggcggtacttgggtcgatatcaaagtgcatcacttcttcccgtatgcccaactttgtatagagagccactgcgggatcgtcaccgtaatctgcttgcacgtagatcacataagcaccaagcgcgttggcctcatgcttgaggagattgatgagcgcggtggcaatgccctgcctccggtgctcgccggagactgcgagatcatagatatagatctcactacgcggctgctcaaacttgggcagaacgtaagccgcgagagcgccaacaaccgcttcttggtcgaaggcagcaagcgcgatgaatgtcttactacggagcaagttcccgaggtaatcggagtccggctgatgttgggagtaggtggctacgtctccgaactcacgaccgaaaagatcaagagcagcccgcatggatttgacttggtcagggccgagcctacatgtgcgaatgatgcccatacttgagccacctaactttgttttagggcgactgccctgctgcgtaacatcgttgctgctgcgtaacatcgttgctgctccataacatcaaacatcgacccacggcgtaacgcgcttgctgcttggatgcccgaggcatagactgtacaaaaaaacagtcataacaagccatgaaaaccgccactgcgccgttaccaccgctgcgttcggtcaaggttctggaccagttgcgtgagcgcatacgctacttgcattacagtttacgaaccgaacaggcttatgtcaactgggttcgtgccttcatccgtttccacggtgtgcgtcacccggcaaccttgggcagcagcgaagtcgaggcatttctgtcctggctggcgaacgagcgcaaggtttcggtctccacgcatcgtcaggcattggcggccttgctgttcttctacggcaaggtgctgtgcacggatctgcccttgcttcaggagatcggtagacctcggccgtcgcggcgcttgccggtggtgctgaccccggatgaagtggttcgcatcctcggttttctggaaggcgagcatcgtttgttcgcccaggactctagctatagttctagtggttggctacagctttgtttgtactatcaacaggttgaactgctgatcaacagatcctctacgcggccgcggtaccataacttcgtatagcatacattatacgaagttatctggtttaaacgtacccgtagtggctatggcagggcttgccgccccgacgttggctgcgagccctgggccttcacccgaacttgggggttggggtggggaaaaggaagaaacgcgggcgtattggtcccaatggggtctcggtggggtatcgacagagtgccagccctgggaccgaaccccgcgtttatgaacaaacgacccaacacccgtgcgttttattctgtctttttattgccgtcatagcgcgggttccttccggtattgtctccttccgtgtttcagttagcctcccccatctcccggtaccgcatgctatgcatcagctgctagcaccatggctcgagatcccgggtgatcaagtcttcgtcgagtgattgtaaataaaatgtaatttacagtatagtattttaattaatatacaaatgatttgataataattcttatttaactataatatattgtgttgggttgaattaaaggtccgtatactagtatcgattcgcgacctactccggaatattaatagatcatggagataattaaaatgataaccatctcgcaaataaataagtattttactgttttcgtaacagttttgtaataaaaaaacctataaatattccggattattcataccgtcccaccatcgggcgcggatccgccaccatggaaaactggtccgctctggaactgctgcccaaggtcggaatccctaccgacttcctgacccacgtcaagacctccgctggcgaggaaatgttcgaggctctgaggatctactacggcgacgaccccgagcgttacaacatccacttcgaggctatcttcggcaccttctgcaaccgtctggaatgggtgtacttcctgacttccggcctggctgctgctgctcacgctatcaagttccacgacctgaacaagctgaccaccggcaagatgctgttccacgtgcaagtgccccgtgtggcttccggtgctggcctgcctacctcccgtcagaccaccatcatggtcaccaagtactccgagaagtcccccatcaccatccctttcgagctgtccgctgcttgcctgacttacctgcgtgaaaccttcgagggcaccatcctggacaagatcctgaacgtcgaggctatgcacaccgtgctgcgtgctctgaagaacaccgctgacgctatggaacgtggcctgatccacagcttcctccagaccctgctgaggaaggctcccccctacttcgtggtgcagaccctggtcgagaacgctaccctggctcgtcaggctctgaaccgtatccagcgctccaacatcctgcagtccttcaaggctaagatgctggctaccctgttcctgctgaaccgtacccgtgaccgtgactacgtgctgaagttcctgacccgtctggctgaggctgctaccgactccatcctcgacaaccctactacctacaccacctcctccggtgctaagatctccggtgtcatggtgtccaccgctaacgtgatgcagatcatcatgtccctgctgtcctcccacatcactaaggaaaccgtgtccgctcccgctacctacggcaacttcgtgctgtcccccgagaacgctgtgaccgctatctcctaccactctatcctggctgacttcaactcctacaaggctcacctgacctccggccagccccacctccccaacgactccctgagccaggctggtgctcactccctgacccccctgtccatggacgtgatccgtctgggcgaaaagaccgtgatcatggaaaacctgcgtcgcgtgtacaagaacaccgacaccaaggaccccctggaacgtaacgtggacctgaccttcttcttccccgtgggcctgtacctgcccgaggaccgtggttacaccaccgtcgagtccaaggtcaagctgaacgacaccgtgcgtaacgctctgcccaccaccgcttacctgctgaacagggaccgtgctgtgcaaaagatcgacttcgtggacgctctcaagaccctgtgccaccccgtgctgcacgagcctgctccatgcctgcaggctttcaccgagcgtggtcccccatccgagcccgctatgcagcgtctgctggaatgccgtttccagcaagagcccatgggtggtgctgctcgtcgtatcccccacttctaccgtgtgcgccgcgaggtgccccgtaccgtgaacgagatgaagcaggacttcgtggtcaccgacttctacaaggttggaaacatcaccctgtacaccgagctgcaccctttcttcgacttcacccactgccaagagaactccgagactgtggctctgtgcaccccccgtatcgtgatcggcaacctgcccgacggcctggctcccggtcccttccacgagctgaggacctgggagatcatggaacacatgcgcctgcgtcccccacccgactacgaggaaaccctgcgtctgttcaagaccaccgtgacctcccccaactaccccgagctgtgctacctggtggacgtgctggtgcacggcaacgctgacgctttcctgctgatccgcgctttcatcgctcgttgcatcgtgaacatgttccacacccgtcagctgctggtgttcgctcactcctacgctctggtcaccctgatcgctgagcacctggctgacggtgctctgcccccccagctcctgttccactaccgtaacctggtggctgtgctgcgcctggtcacccgtatctccgctctgcccggcctgaacaacggccagctggctgaggaacccctgtccgcttacgtgaacgctctgcacgaccacaggctgtggccccccttcgtgacccacctccctcgtaacatggaaggtgtccaggtggtggctgatcgtcagcccctgaaccccgctaacatcgaggctcgtcaccacggtgtctccgacgtgccccgtctgggtgctatggacgctgacgagcccctgttcgtggacgactaccgtgctaccgacgacgagtggaccctgcaaaaggtgttctacctgtgcctgatccccgctatgaccaacaaccgtgcttgcggcctgggcctgaacctcaagactctgctggtggacctgttctaccgtcccgccttcctgctcatgcccgctgctaccgctgtgtccacctccggcaccacctccaaggaatccacctctggtgtcacccccgaggactccgtggctgctcagcgtcaggctgtgggcgagatgctgaccgagctggtcgaggacgtggccaccgacgctcacacccctctgctgcaggcttgccgcgagctgttcctggctgtgcagttcgtgggcgagcacgtgaaggtgctggaagtgcgtgctcccctggaccacgctcagaggcagggactgcccgacttcatctcccgtcagcatgtgctgtacaacggttgctgcgtcgtgaccgctcctaagaccctgatcgagtactccctgcccgtgcccttccaccgtttctactccaaccccaccatctgcgctgctctgtccgacgacatcaagcgttacgtgaccgagttcccccactaccatagacacgatggtggtttccccctgcccaccgctttcgctcacgagtaccacaactggctgcgtagccccttctcccgttactccgctacctgccccaacgtgctgcactccgtgatgaccctggctgctatgctgtacaagatctcccccgtgtccctggtgctgcagaccaaggctcacatccaccccggtttcgctctgaccgctgtgcgtaccgacaccttcgaggtggacatgctgctgtactccggcaagtcctgcacctccgtcatcatcaacaaccccatcgtgaccaaggaagagagggacatctccaccacctaccacgtgacccagaacatcaacaccgtggacatgggcctgggttacacctccaacacttgcgtggcctacgtgaaccgcgtccgcaccgacatgggtgtccgtgtgcaggacctgttccgtgtgttccccatgaacgtgtaccgccacgatgaggtggaccgttggatcaggcacgctgctggcgtcgagcgtccccagctgctggacaccgagactatctccatgctgaccttcggttccatgtccgagcgcaacgctgctgctaccgtgcacggccagaaggctgtctgcgagctgatcctgacccctgtgactatggacgtgaactacttcaagatcaccaacaaccctcgtggtcgtgcttcctgcatgctgggcgtggacccctacgacaccgaggctgccaccaaggctatctacgaccaccgcgaggctgacgctcagaccttcgctgctacccacaacccatgggcttcccaggctggttgcctgtccgacgtcctgtacaacacccgtcaccgcgagcgtctgggctacaactccaagttctactccccctgcgctcagtacttcaacaccgaggaaatcatcgctgccaacaagaccctcttcaagaccatcgacgagtacctgctgcgcgctaaggactgcatccgtggcgacaccgacactcagtacgtgtgcgtcgagggaaccgagcagctgatcgagaacccttgccgtctgacccaagaggctctgcccatcctgtccaccaccaccctggctctgatggaaactaagctgaagggtggcgctggtgctttcgctacctccgagactcacttcggcaactacgtcgtgggagagatcatccccctgcagcagtccatgctgttcaacagctaagagctcaagcttgtcgagaagtactagaggatcataatcagccataccacatttgtagaggttttacttgctttaaaaaacctcccacacctccccctgaacctgaaacataaaatgaatgcaattgttgttgttaacttgtttattgcagcttataatggttacaaataaagcaatagcatcacaaatttcacaaataaagcatttttttcactgcattctagttgtggtttgtccaaactcatcaatgtatcttatcatgtctggatctgatcactgcttgagcctagaagatccggctgctaacaaagcccgaaaggaagctgagttggctgctgtggctagctttgtttaactttaagaaggagatacatctagaccggaatattaatagatcatggagataattaaaatgataaccatctcgcaaataaataagtattttactgttttcgtaacagttttgtaataaaaaaacctataaatattccggattattcataccgtcccaccatcgggcgcggatcccggtccgaagcgcgcggaattcaaaggcctacgtcgacgccaccatggaatcccgtggtcgtcgttgccccgagatgatctccgtgctgggtcccatctccggtcacgtcctgaaggctgtgttctcccgtggcgacacccccgtgctgccccacgaaactcgtctgctgcagaccggtatccacgtgcgtgtgtcccagccctccctgatcctggtgtcccagtacacccccgactccaccccttgccaccgcggagacaaccagctgcaggtccagcacacctacttcaccggttccgaggtcgagaacgtgtccgtgaacgtgcacaaccccaccggtcgttccatctgcccctcccaagagcccatgtccatctacgtgtacgctctgcccctgaagatgctgaacatcccctccatcaacgtgcaccactacccctccgctgctgagcgcaagcaccgtcacctccccgtggctgacgctgtgatccacgcttccggcaagcagatgtggcaggctcgtctgaccgtgtccggcctggcttggacccgtcagcagaaccagtggaaggaacccgacgtgtactacacctccgctttcgtgttccccaccaaggacgtggccctgcgtcacgtcgtgtgcgctcacgaactcgtgtgctccatggaaaacacccgtgctaccaagatgcaagtgatcggcgaccagtacgtgaaggtgtacctggaatccttctgcgaggacgtgccctccggcaagctgttcatgcacgtgaccctgggttccgacgtggaagaggacctgaccatgacccgtaacccccagcccttcatgcgtccccacgagcgtaacggtttcaccgtgctgtgccccaagaacatgatcatcaagcccggcaagatctcccacatcatgctggacgtggccttcacctcccacgagcacttcggcctgctgtgccctaagtccatccccggcctgtccatctccggcaacctgctgatgaacggccagcagatcttcctggaagtgcaggctatccgtgaaaccgtcgagctgcgtcagtacgaccctgtggctgctctgttcttcttcgacatcgacctgctgctgcagcgtggtccccagtactccgagcaccccaccttcaccagccagtaccgtatccagggcaagctggaataccgtcacacctgggaccgtcacgacgagggtgctgctcagggcgacgacgacgtgtggacctccggttccgactccgacgaggaactggtcaccaccgagcgcaagaccccccgtgtgaccggtggtggtgctatggctggtgcttccacctccgctggtcgcaagcgcaagtccgcttcctccgctaccgcttgcaccgctggtgtcatgacccgtggtcgcctgaaggctgagtccaccgtggctcccgaagaggacactgacgaggactccgacaacgagatccacaaccccgctgtgttcacctggcccccctggcaggctggtatcctggctcgtaacctggtgcccatggtggctaccgtgcagggccagaacctgaagtaccaagagttcttctgggacgccaacgacatctaccgtatcttcgctgagctggaaggcgtgtggcagcccgctgctcagcccaagcgtcgtcgtcaccgtcaggacgctctgcctggtccctgtatcgcttccacccccaagaagcaccgcggctaaaagcttgtcgagaagtactagaggatcataatcagccataccacatttgtagaggttttacttgctttaaaaaacctcccacacctccccctgaacctgaaacataaaatgaatgcaattgttgttgttaacttgtttattgcagcttataatggttacaaataaagcaatagcatcacaaatttcacaaataaagcatttttttcactgcattctagttgtggtttgtccaaactcatcaatgtatcttatcatgtctggatctgatcactgcttgagcctagaagatccggctgctaacaaagcccgaaaggaagctgagttggctgctgccaccgctgagcaataactatcataaccggaatattaatagatcatggagataattaaaatgataaccatctcgcaaataaataagtattttactgttttcgtaacagttttgtaataaaaaaacctataaatattccggattattcataccgtcccaccatcgggcgcggatcccggtccgaagcgcgcggaattcgccaccatgaccatggacgagcagcagccccaggctgtgacccccgtgtacgtgggcggtttcctggctcgttacgaccagtcccccgacgaggctgagctgctgctgccacgtgacgtggtcgaacactggctgcacgctcagggccagggacagccttccctgtccgtggctctgcccctgaacatcaaccacgacgacaccgctgtcgtgggtcacgtggccgctatgcagtccgtgcgtgacggcctgttctgcctgggttgcgtgacctccccccgtttcctggaaatcgtgcgtcgtgcttccgagaagtccgagctggtgtcccgtggtcccgtgtccccactgcagcccgacaaggtggtcgagttcctgtccggttcctacgctggcctgtccctgtcatcccgtcgttgcgacgacgtcgaggctgctacctccctgagcggctccgagactacccccttcaagcacgtggccctgtgctccgtgggtcgtaggcgtggaaccctggctgtgtacggtcgtgaccccgagtgggtcacccagcgtttccccgacctgaccgctgctgaccgtgacggactgcgtgctcagtggcagcgttgcggttccaccgctgtggacgcttccggcgaccccttccgttccgactcctacggcctgctgggcaactccgtggacgctctgtacatccgcgagcgtctgcccaagctgcgttacgacaagcagctcgtgggtgtcaccgagcgcgagtcctacgtgaaggcttccgtgtcccccgaggctgcttgcgacatcaaggctgcttccgctgagcgttctggcgacagccgctcccaggctgctactcctgctgctggtgctcgtgtgccctccagctccccatccccacctgtcgagcctccctcccccgtgcaacctcctgctctgcctgcttccccctccgtgctgcctgctgagtccagcccctccctgtcaccctctgagcctgctgaggctgcctccatgtcccaccctctgagcgctgctgtgactgctgctaccgctccccctggtgctactgtggctggtgcttcccccgctgtgccttccctggcttggcctcacgacggtgtctacctgcccaaggacgctttcttctccctgctgggcgcttcccgttccgctgctcccgtgatgtaccccggtgctgtggctgctccccccagcgcttcacctgctcctctgcccctgccctcctaccccgcttcctacggtgctcccgtcgtgggttacgaccagctggctgctcgtcacttcgctgactacgtggacccccactaccccggctggggtcgtcgttacgagcccgctccttccctgcacccatcctaccctgtgccccctcctccatcacccgcttactaccgtcgtcgtgactcccccggtggcatggacgagcctccatctggatgggagcgttacgacggttcccaccgtggccagtcccaaaagcagcaccgtcacggtggttccggtggtcacaacaagcgtcgcaaggaagccgctgctgcatcctccagctccgacgaggacctgagcttccccggcgaggctgaacacggtcgtgctcgcaagcgtctgaagtcccacgtgaactccgacggaggtagcggaggccacgctggttccaaccagcagcagcaacagcgctacgacgagctgcgtgacgctatccacgagctgaagcgtgacctgttcgctgctcgccagtcctccaccctgctgtctgctgctctgccagctgccgcttcttcctcccctaccaccaccaccgtgtgcacccctactggcgagctgacctctggtggtggcgagactcccaccgctctgctgtccggtggtgctaaggtggccgagcgtgctcaggctggtgtcgtgaacgcttcctgccgtctggctaccgcttccggttccgaggctgccaccgctggtccctctaccgctggttcctcatcctgcccagcttccgtggtgctggctgccgctgctgctcaagccgccgctgcttcacagtcccccccaaaggatatggtggacctgaaccgtcgtatcttcgtggctgctctgaacaagctcgagtaataaaagcttgtcgagaagtactagaggatcataatcagccataccacatttgtagaggttttacttgctttaaaaaacctcccacacctccccctgaacctgaaacataaaatgaatgcaattgttgttgttaacttgtttattgcagcttataatggttacaaataaagcaatagcatcacaaatttcacaaataaagcatttttttcactgcattctagttgtggtttgtccaaactcatcaatgtatcttatcatgtctggatctgatcactgcttgagcctagaagatccggctgctaacaaagcccgaaaggaagctgggaatattaatagatcatggagataattaaaatgataaccatctcgcaaataaataagtattttactgttttcgtaacagttttgtaataaaaaaacctataaatattccggattattcataccgtcccaccatcgggcgcggatccgccaccatggctgctatggaagctaacatcttctgcaccttcgaccacaagctgtctatcgctgacgtgggcaagctgaccaagctggtggctgctgtggtgcccatcccccagcgtctgcacctgatcaagcactaccagctgggcctgcaccagttcgtggaccacacccgtggttacgtgcgtctgcgtggcctgctgcgtaacatgaccctgaccctgatgcgtcgtgtcgagggcaaccagatcctgctgcacgtgcccacccacggcctgctgtacaccgtgctgaacaccggtcccgtgacctgggagaagggcgacgctctgtgcgtgctgccccccctgttccacggtcccctggctcgtgaaaacctgttgaccctgggccagtgggagctggtgctgccctggatcgtgcccatgcccctggctctggaaatcaaccagcgcctgctgatcatgggcctgttctccctggaccgttcctacgaagaagtgaaggctgctgtccagcagctgcagaccatcaccttccgtgacgctaccttcaccatccccgaccccgtgatcgaccagcacctcctgatcgacatgaagaccgcttgcctgtccatgtccatggtggctaacctggcttccgagctgaccatgacctacgtccgcaagctggctttggaggactcttccatgctgctggtcaagtgccaagagctgctgatgcgtctggaccgcgagcgttccgtgggcgagcctcgtactcccgctcgtcctcagcacgtgtcccccgacgacgagatcgctcgtctgtccgctctgttcgtgatgctgcgtcagctggacgacctgatccgcgagcaggtcgtgttcaccgtgtgcgacgtgagcccagacaacaagtccgctacctgcatcttcaagggctaaggcgcgccaagcttgtcgagaagtactagaggatcataatcagccataccacatttgtagaggttttacttgctttaaaaaacctcccacacctccccctgaacctgaaacataaaatgaatgcaattgttgttgttaacttgtttattgcagcttataatggttacaaataaagcaatagcatcacaaatttcacaaataaagcatttttttcactgcattctagttgtggtttgtccaaactcatcaatgtatcttatcatgtctggatctgatcactgcttgagcctagaagatccggctgctaacaaagcccgaaaggaagctgagttggctgctgctgagtagtgcgcgagcaaaatttaagctacaacaaggcacgcgtccggaatattaatagatcatggagataattaaaatgataaccatctcgcaaataaataagtattttactgttttcgtaacagttttgtaataaaaaaacctataaatattccggattattcataccgtcccaccatcgggcgcggatcccggtccgaagcgcgcggaattcaaaggcctacatggccccctcccacgtggacaaggtgaacacccgcacctggtccgcctccatcgtgttcatggtgctgaccttcgtgaacgtgtccgtgcacctggtgctgtccaacttcccccacctgggctacccctgcgtgtactaccacgtggtggacttcgagcgcctgaacatgtccgcctacaacgtgatgcacctgcacacccccatgctgttcctggactccgtgcagctggtgtgctacgccgtgttcatgcagctggtgttcctggccgtgaccatctactacctggtgtgctggatcaagatctccatgcgcaaggacaagggcatgtccctgaaccagtccacccgcgacatctcctacatgggcgactccctgaccgccttcctgttcatcctgtccatggacaccttccagctgttcaccctgaccatgtccttccgcctgccctccatgatcgccttcatggccgccgtgcacttcttctgcctgaccatcttcaacgtgtccatggtgacccagtaccgctcctacaagcgctccctgttcttcttctcccgcctgcaccccaagctgaagggcaccgtgcagttccgcaccctgatcgtgaacctggtggaggtggccctgggcttcaacaccaccgtggtggccatggccctgtgctacggcttcggcaacaacttcttcgtgcgcaccggccacatggtgctggccgtgttcgtggtgtacgccatcatctccatcatctacttcctgctgatcgaggccgtgttcttccagtacgtgaaggtgcagttcggctaccacctgggcgccttcttcggcctgtgcggcctgatctaccccatcgtgcagtacgacaccttcctgtccaacgagtaccgcaccggcatctcctggtccttcggcatgctgttcttcatctgggccatgttcaccacctgccgcgccgtgcgctacttccgcggccgcggctccggctccgtgaagtaccaggccctggccaccgcctccggcgaggaggtggccgccctgtcccaccacgactccctggagtcccgccgcctgcgcgaggaggaggacgacgacgacgacgaggacttcgaggacgcctaaaagcttgtcgagaagtactagaggatcataatcagccataccacatttgtagaggttttacttgctttaaaaaacctcccacacctccccctgaacctgaaacataaaatgaatgcaattgttgttgttaacttgtttattgcagcttataatggttacaaataaagcaatagcatcacaaatttcacaaataaagcatttttttcactgcattctagttgtggtttgtccaaactcatcaatgtatcttatcatgtctggatctgatcactgcttgagcctagaagatccggctgctaacaaagcccgaaaggaagctgagttggctgctgccaccgctgagcaataactatcataacccctaggagatccgaaccagataagtgaaatctagttccaaactattttgtcatttttaattttcgtattagcttacgacgctacacccagttcccatctattttgtcactcttccctaaataatccttaaaaactccatttccacccctcccagttcccaactattttgtccgcccaca

SEQ ID NO: 72 - DNA, 5329 bp, Artificial Sequence
  Synthetic construct
ttgttccagtttggaacaagagtccactattaaagaacgtggactccaacgtcaaagggcgaaaaaccgtctatcagggcgatggcccactacgtgaaccatcaccctaatcaagttttttggggtcgaggtgccgtaaagcactaaatcggaaccctaaagggagcccccgatttagagcttgacggggaaagccggcgaacgtggcgagaaaggaagggaagaaagcgaaaggagcgggcgctagggcgctggcaagtgtagcggtcacgctgcgcgtaaccaccacacccgccgcgcttaatgcgccgctacagggcgcgtcgcgccattcgccattcaggctgcgcaactgttgggaagggcgatcggtgcgggcctcttcgctattacgccagctggcgaaagggggatgtgctgcaaggcgattaagttgggtaacgccagggttttcccagtcacgacgttgtaaaacgacggccagtgcatagaccagccgcgtaacctggcaaaatcggttacggttgagtaataaatggatgccctgcgtaagcgggtgtgggcggacaataaagtcttaaactgaacaaaatagatctaaactatgacaataaagtcttaaactagacagaatagttgtaaactgaaatcagtccagttatgctgtgaaaaagcatactggacttttgttatggctaaagcaaactcttcattttctgaagtgcaaattgcccgtcgtattaaagaggggcgtggccaagggcatggtaaagactatattcgcggcgttgtgacaatttaccgaacaactccgcggccgggaagccgatctcggcttgaacgaattgttaggtggcggtacttgggtcgatatcaaagtgcatcacttcttcccgtatgcccaactttgtatagagagccactgcgggatcgtcaccgtaatctgcttgcacgtagatcacataagcaccaagcgcgttggcctcatgcttgaggagattgatgagcgcggtggcaatgccctgcctccggtgctcgccggagactgcgagatcatagatatagatctcactacgcggctgctcaaacttgggcagaacgtaagccgcgagagcgccaacaaccgcttcttggtcgaaggcagcaagcgcgatgaatgtcttactacggagcaagttcccgaggtaatcggagtccggctgatgttgggagtaggtggctacgtctccgaactcacgaccgaaaagatcaagagcagcccgcatggatttgacttggtcagggccgagcctacatgtgcgaatgatgcccatacttgagccacctaactttgttttagggcgactgccctgctgcgtaacatcgttgctgctgcgtaacatcgttgctgctccataacatcaaacatcgacccacggcgtaacgcgcttgctgcttggatgcccgaggcatagactgtacaaaaaaacagtcataacaagccatgaaaaccgccactgcgccgttaccaccgctgcgttcggtcaaggttctggaccagttgcgtgagcgcatacgctacttgcattacagtttacgaaccgaacaggcttatgtcaactgggttcgtgccttcatccgtttccacggtgtgcgtcacccggcaaccttgggcagcagcgaagtcgaggcatttctgtcctggctggcgaacgagcgcaaggtttcggtctccacgcatcgtcaggcattggcggccttgctgttcttctacggcaaggtgctgtgcacggatctgcccttgcttcaggagatcggtagacctcggccgtcgcggcgcttgccggtggtgctgaccccggatgaagtggttcgcatcctcggttttctggaaggcgagcatcgtttgttcgcccaggactctagctatagttctagtggttggctacagctttgtttgtactatcaacaggttgaactgctgatcaacagatcctctacgcggccgcggtaccataacttcgtatagcatacattatacgaagttatctggtttaaacgtacccgtagtggctatggcagggcttgccgccccgacgttggctgcgagccctgggccttcacccgaacttgggggttggggtggggaaaaggaagaaacgcgggcgtattggtcccaatggggtctcggtggggtatcgacagagtgccagccctgggaccgaaccccgcgtttatgaacaaacgacccaacacccgtgcgttttattctgtctttttattgccgtcatagcgcgggttccttccggtattgtctccttccgtgtttcagttagcctcccccatctcccggtaccgcatgctatgcatcagctgctagcaccatggctcgagatcccgggtgatcaagtcttcgtcgagtgattgtaaataaaatgtaatttacagtatagtattttaattaatatacaaatgatttgataataattcttatttaactataatatattgtgttgggttgaattaaaggtccgtatactagtatcgattcgcgacctactccggaatattaatagatcatggagataattaaaatgataaccatctcgcaaataaataagtattttactgttttcgtaacagttttgtaataaaaaaacctataaatattccggattattcataccgtcccaccatcgggcgcggatccgccaccatggccccctcccacgtggacaaggtgaacacccgcacctggtccgcctccatcgtgttcatggtgctgaccttcgtgaacgtgtccgtgcacctggtgctgtccaacttcccccacctgggctacccctgcgtgtactaccacgtggtggacttcgagcgcctgaacatgtccgcctacaacgtgatgcacctgcacacccccatgctgttcctggactccgtgcagctggtgtgctacgccgtgttcatgcagctggtgttcctggccgtgaccatctactacctggtgtgctggatcaagatctccatgcgcaaggacaagggcatgtccctgaaccagtccacccgcgacatctcctacatgggcgactccctgaccgccttcctgttcatcctgtccatggacaccttccagctgttcaccctgaccatgtccttccgcctgccctccatgatcgccttcatggccgccgtgcacttcttctgcctgaccatcttcaacgtgtccatggtgacccagtaccgctcctacaagcgctccctgttcttcttctcccgcctgcaccccaagctgaagggcaccgtgcagttccgcaccctgatcgtgaacctggtggaggtggccctgggcttcaacaccaccgtggtggccatggccctgtgctacggcttcggcaacaacttcttcgtgcgcaccggccacatggtgctggccgtgttcgtggtgtacgccatcatctccatcatctacttcctgctgatcgaggccgtgttcttccagtacgtgaaggtgcagttcggctaccacctgggcgccttcttcggcctgtgcggcctgatctaccccatcgtgcagtacgacaccttcctgtccaacgagtaccgcaccggcatctcctggtccttcggcatgctgttcttcatctgggccatgttcaccacctgccgcgccgtgcgctacttccgcggccgcggctccggctccgtgaagtaccaggccctggccaccgcctccggcgaggaggtggccgccctgtcccaccacgactccctggagtcccgccgcctgcgcgaggaggaggacgacgacgacgacgaggacttcgaggacgcctaagagctcaagcttgtcgagaagtactagaggatcataatcagccataccacatttgtagaggttttacttgctttaaaaaacctcccacacctccccctgaacctgaaacataaaatgaatgcaattgttgttgttaacttgtttattgcagcttataatggttacaaataaagcaatagcatcacaaatttcacaaataaagcatttttttcactgcattctagttgtggtttgtccaaactcatcaatgtatcttatcatgtctggatctgatcactgcttgagcctagaagatccggctgctaacaaagcccgaaaggaagctgagttggctgctgtggctagctttgtttaactttaagaaggagatacatctagaaatattaatagatcatggagataattaaaatgataaccatctcgcaaataaataagtattttactgttttcgtaacagttttgtaataaaaaaacctataaatattccggattattcataccgtcccaccatcgggcgcggatcccggtccgaagcgcgcggaattcaaaggcctacgccaccatggagtggaacacactagtactaggtcttttggttttatcggtagcggcaagttccaaccatacgtcgactgctagcacaccgagtccctctagctctactcacacctcaacgaccgtgaaggcaacgactactgcgacaactagtacaactacggtgacaagtacgacttcatcaacgactagtaccaaacccggttccaccactcacgaccccaatgtgatgagaccacatgctcacaatgatttttacaaggcgcattgtacatcgcatatgtatgaactttctctgtccagctttgcggcctggtggactatgcttaatgctctcattctcatgggagctttttgtatcgtactacgacattgctgtttccagaactttactgcaaccaccaccaaaggctattgataaaagcttgtcgagaagtactagaggatcataatcagccataccacatttgtagaggttttacttgctttaaaaaacctcccacacctccccctgaacctgaaacataaaatgaatgcaattgttgttgttaacttgtttattgcagcttataatggttacaaataaagcaatagcatcacaaatttcacaaataaagcatttttttcactgcattctagttgtggtttgtccaaactcatcaatgtatcttatcatgtctggatctgatcactgcttgagcctagaagatccggctgctaacaaagcccgaaaggaagctgagttggctgctgccaccgctgagcaataactatcataacccctaggagatccgaaccagataagtgaaatctagttccaaactattttgtcatttttaattttcgtattagcttacgacgctacacccagttcccatctattttgtcactcttccctaaataatccttaaaaactccatttccacccctcccagttcccaactattttgtccgcccaca

SEQ ID NO: 73 - DNA, 18685 bp, Artificial Sequence
  Synthetic construct
ttgttccagtttggaacaagagtccactattaaagaacgtggactccaacgtcaaagggcgaaaaaccgtctatcagggcgatggcccactacgtgaaccatcaccctaatcaagttttttggggtcgaggtgccgtaaagcactaaatcggaaccctaaagggagcccccgatttagagcttgacggggaaagccggcgaacgtggcgagaaaggaagggaagaaagcgaaaggagcgggcgctagggcgctggcaagtgtagcggtcacgctgcgcgtaaccaccacacccgccgcgcttaatgcgccgctacagggcgcgtcgcgccattcgccattcaggctgcgcaactgttgggaagggcgatcggtgcgggcctcttcgctattacgccagctggcgaaagggggatgtgctgcaaggcgattaagttgggtaacgccagggttttcccagtcacgacgttgtaaaacgacggccagtgcatagaccagccgcgtaacctggcaaaatcggttacggttgagtaataaatggatgccctgcgtaagcgggtgtgggcggacaataaagtcttaaactgaacaaaatagatctaaactatgacaataaagtcttaaactagacagaatagttgtaaactgaaatcagtccagttatgctgtgaaaaagcatactggacttttgttatggctaaagcaaactcttcattttctgaagtgcaaattgcccgtcgtattaaagaggggcgtggccaagggcatggtaaagactatattcgcggcgttgtgacaatttaccgaacaactccgcggccgggaagccgatctcggcttgaacgaattgttaggtggcggtacttgggtcgatatcaaagtgcatcacttcttcccgtatgcccaactttgtatagagagccactgcgggatcgtcaccgtaatctgcttgcacgtagatcacataagcaccaagcgcgttggcctcatgcttgaggagattgatgagcgcggtggcaatgccctgcctccggtgctcgccggagactgcgagatcatagatatagatctcactacgcggctgctcaaacttgggcagaacgtaagccgcgagagcgccaacaaccgcttcttggtcgaaggcagcaagcgcgatgaatgtcttactacggagcaagttcccgaggtaatcggagtccggctgatgttgggagtaggtggctacgtctccgaactcacgaccgaaaagatcaagagcagcccgcatggatttgacttggtcagggccgagcctacatgtgcgaatgatgcccatacttgagccacctaactttgttttagggcgactgccctgctgcgtaacatcgttgctgctgcgtaacatcgttgctgctccataacatcaaacatcgacccacggcgtaacgcgcttgctgcttggatgcccgaggcatagactgtacaaaaaaacagtcataacaagccatgaaaaccgccactgcgccgttaccaccgctgcgttcggtcaaggttctggaccagttgcgtgagcgcatacgctacttgcattacagtttacgaaccgaacaggcttatgtcaactgggtttgtgccttcatccgtttccacggtgtgcgtcacccggcaaccttgggcagcagcgaagtcgaggcatttctgtcctggctggcgaacgagcgcaaggtttcggtctccacgcatcgtcaggcattggcggccttgctgttcttctacggcaaggtgctgtgcacggatctgcccttgcttcaggagatcggtagacctcggccgtcgcggcgcttgccggtggtgctgaccccggatgaagtggttcgcatcctcggttttctggaaggcgagcatcgtttgttcgcccaggactctagctatagttctagtggttggctacagctttgtttgtactatcaacaggttgaactgctgatcaacagatcctctacgcggccgcggtaccataacttcgtatagcatacattatacgaagttatctggtttaaacgtacccgtagtggctatggcagggcttgccgccccgacgttggctgcgagccctgggccttcacccgaacttgggggttggggtggggaaaaggaagaaacgcgggcgtattggtcccaatggggtctcggtggggtatcgacagagtgccagccctgggaccgaaccccgcgtttatgaacaaacgacccaacacccgtgcgttttattctgtctttttattgccgtcatagcgcgggttccttccggtattgtctccttccgtgtttcagttagcctcccccatctcccggtaccgcatgctatgcatcagctgctagcaccatggctcgagatcccgggtgatcaagtcttcgtcgagtgattgtaaataaaatgtaatttacagtatagtattttaattaatatacaaatgatttgataataattcttatttaactataatatattgtgttgggttgaattaaaggtccgtatactagtatcgattcgcgacctactccggaatattaatagatcatggagataattaaaatgataaccatctcgcaaataaataagtattttactgttttcgtaacagttttgtaataaaaaaacctataaatattccggattattcataccgtcccaccatcgggcgcggatccgccaccatggccccctcccacgtggacaaggtgaacacccgcacctggtccgcctccatcgtgttcatggtgctgaccttcgtgaacgtgtccgtgcacctggtgctgtccaacttcccccacctgggctacccctgcgtgtactaccacgtggtggacttcgagcgcctgaacatgtccgcctacaacgtgatgcacctgcacacccccatgctgttcctggactccgtgcagctggtgtgctacgccgtgttcatgcagctggtgttcctggccgtgaccatctactacctggtgtgctggatcaagatctccatgcgcaaggacaagggcatgtccctgaaccagtccacccgcgacatctcctacatgggcgactccctgaccgccttcctgttcatcctgtccatggacaccttccagctgttcaccctgaccatgtccttccgcctgccctccatgatcgccttcatggccgccgtgcacttcttctgcctgaccatcttcaacgtgtccatggtgacccagtaccgctcctacaagcgctccctgttcttcttctcccgcctgcaccccaagctgaagggcaccgtgcagttccgcaccctgatcgtgaacctggtggaggtggccctgggcttcaacaccaccgtggtggccatggccctgtgctacggcttcggcaacaacttcttcgtgcgcaccggccacatggtgctggccgtgttcgtggtgtacgccatcatctccatcatctacttcctgctgatcgaggccgtgttcttccagtacgtgaaggtgcagttcggctaccacctgggcgccttcttcggcctgtgcggcctgatctaccccatcgtgcagtacgacaccttcctgtccaacgagtaccgcaccggcatctcctggtccttcggcatgctgttcttcatctgggccatgttcaccacctgccgcgccgtgcgctacttccgcggccgcggctccggctccgtgaagtaccaggccctggccaccgcctccggcgaggaggtggccgccctgtcccaccacgactccctggagtcccgccgcctgcgcgaggaggaggacgacgacgacgacgaggacttcgaggacgcctaagagctcaagcttgtcgagaagtactagaggatcataatcagccataccacatttgtagaggttttacttgctttaaaaaacctcccacacctccccctgaacctgaaacataaaatgaatgcaattgttgttgttaacttgtttattgcagcttataatggttacaaataaagcaatagcatcacaaatttcacaaataaagcatttttttcactgcattctagttgtggtttgtccaaactcatcaatgtatcttatcatgtctggatctgatcactgcttgagcctagaagatccggctgctaacaaagcccgaaaggaagctgagttggctgctgtggctagctttgtttaactttaagaaggagatacatctagaaatattaatagatcatggagataattaaaatgataaccatctcgcaaataaataagtattttactgttttcgtaacagttttgtaataaaaaaacctataaatattccggattattcataccgtcccaccatcgggcgcggatcccggtccgaagcgcgcggaattcaaaggcctacgccaccatggagtggaacacactagtactaggtcttttggttttatcggtagcggcaagttccaaccatacgtcgactgctagcacaccgagtccctctagctctactcacacctcaacgaccgtgaaggcaacgactactgcgacaactagtacaactacggtgacaagtacgacttcatcaacgactagtaccaaacccggttccaccactcacgaccccaatgtgatgagaccacatgctcacaatgatttttacaaggcgcattgtacatcgcatatgtatgaactttctctgtccagctttgcggcctggtggactatgcttaatgctctcattctcatgggagctttttgtatcgtactacgacattgctgtttccagaactttactgcaaccaccaccaaaggctattgataaaagcttgtcgagaagtactagagaagcttgtcgagaagtactagaggatcataatcagccataccacatttgtagaggttttacttgctttaaaaaacctcccacacctccccctgaacctgaaacataaaatgaatgcaattgttgttgttaacttgtttattgcagcttataatggttacaaataaagcaatagcatcacaaatttcacaaataaagcatttttttcactgcattctagttgtggtttgtccaaactcatcaatgtatcttatcatgtctggatctgatcactgcttgagcctagaagatccggctgctaacaaagcccgaaaggaagctgagttggctgctgccaccgctgagcaataactatcataacccctaggggcctctaaacgggtcttgaggggttttttgctgaaaggaggaactatatccggatctgaacaggagggacagctgatagaaacagaagccactggagcacctcaaaaacaccatcatacactaaatcagtaagttggcagcatcacccgacgcactttgcgccgaataaatacctgtgacggaagatcacttcgcagaataaataaatcctggtgtccctgttgataccgggaagccctgggccaacttttggcgaaaatgagacgttgatcggcacgtaagaggttccaactttcaccataatgaaataagatcactaccgggcgtattttttgagttatcgagattttcaggagctaaggaagctaaaatggagaaaaaaatcactggatataccaccgttgatatatcccaatggcatcgtaaagaacattttgaggcatttcagtcagttgctcaatgtacctataaccagaccgttcagctggatattacggcctttttaaagaccgtaaagaaaaataagcacaagttttatccggcctttattcacattcttgcccgcctgatgaatgctcatccggaattccgtatggcaatgaaagacggtgagctggtgatatgggatagtgttcacccttgttacaccgttttccatgagcaaactgaaacgttttcatcgctctggagtgaataccacgacgatttccggcagtttctacacatatattcgcaagatgtggcgtgttacggtgaaaacctggcctatttccctaaagggtttattgagaatatgtttttcgtctcagccaatccctgggtgagtttcaccagttttgatttaaacgtggccaatatggacaacttcttcgcccccgttttcaccatgggcaaatattatacgcaaggcgacaaggtgctgatgccgctggcgattcaggttcatcatgccgtttgtgatggcttccatgtcggcagaatgcttaatgaattacaacagtactgcgatgagtggcagggcggggcgtaatttttttaaggcagttattggtgcccttaaacgcctggttgctacgcctgaataagtgataataagcggatgaatggcagaaattcgaaagcaaattcgacccggtcgtcggttcagggcagggtcgttaaatagccgcttatgtctattgctggtttaccggtttattgactaccggaagcagtgtgaccgtgtgcttctcaaatgcctgaggccagtttgctcaggctctccccgtggaggtaataattgacgatatgatcatttattctgcctcccagctgacattcatccggggtcagcaccgtttctgcggactggctttctacgtgttccgcttcctttagcagcccttgcgccctgagtgcttgcggcagcgtgaagctaattctgtcagccgttaagtgttcctgtgtcactcaaaattgctttgagaggctctaagggcttctcagtgcgttacatccctggcttgttgtccacaaccgttaaaccttaaaagctttaaaagccttatatattcttttttttcttataaaacttaaaaccttagaggctatttaagttgctgatttatattaattttattgttcaaacatgagagcttagtacgtgaaacatgagagcttagtacgttagccatgagagcttagtacgttagccatgagggtttagttcgttaaacatgagagcttagtacgttaaacatgagagcttagtacgtgaaacatgagagcttagtacgtactatcaacaggttgaactgctgatcaacagatcctctacgcggccgcggtaccataacttcgtatagcatacattatacgaagttatctggtttaaacgtacccgtagtggctatggcagggcttgccgccccgacgttggctgcgagccctgggccttcacccgaacttgggggttggggtggggaaaaggaagaaacgcgggcgtattggtcccaatggggtctcggtggggtatcgacagagtgccagccctgggaccgaaccccgcgtttatgaacaaacgacccaacacccgtgcgttttattctgtctttttattgccgtcatagcgcgggttccttccggtattgtctccttccgtgtttcagttagcctcccccatctcccggtaccgcatgctatgcatcagctgctagcaccatggctcgagatcccgggtgatcaagtcttcgtcgagtgattgtaaataaaatgtaatttacagtatagtattttaattaatatacaaatgatttgataataattcttatttaactataatatattgtgttgggttgaattaaaggtccgtatactagtatcgattcgcgacctactccggaatattaatagatcatggagataattaaaatgataaccatctcgcaaataaataagtattttactgttttcgtaacagttttgtaataaaaaaacctataaatattccggattattcataccgtcccaccatcgggcgcggatccgccaccatggaaaactggtccgctctggaactgctgcccaaggtcggaatccctaccgacttcctgacccacgtcaagacctccgctggcgaggaaatgttcgaggctctgaggatctactacggcgacgaccccgagcgttacaacatccacttcgaggctatcttcggcaccttctgcaaccgtctggaatgggtgtacttcctgacttccggcctggctgctgctgctcacgctatcaagttccacgacctgaacaagctgaccaccggcaagatgctgttccacgtgcaagtgccccgtgtggcttccggtgctggcctgcctacctcccgtcagaccaccatcatggtcaccaagtactccgagaagtcccccatcaccatccctttcgagctgtccgctgcttgcctgacttacctgcgtgaaaccttcgagggcaccatcctggacaagatcctgaacgtcgaggctatgcacaccgtgctgcgtgctctgaagaacaccgctgacgctatggaacgtggcctgatccacagcttcctccagaccctgctgaggaaggctcccccctacttcgtggtgcagaccctggtcgagaacgctaccctggctcgtcaggctctgaaccgtatccagcgctccaacatcctgcagtccttcaaggctaagatgctggctaccctgttcctgctgaaccgtacccgtgaccgtgactacgtgctgaagttcctgacccgtctggctgaggctgctaccgactccatcctcgacaaccctactacctacaccacctcctccggtgctaagatctccggtgtcatggtgtccaccgctaacgtgatgcagatcatcatgtccctgctgtcctcccacatcactaaggaaaccgtgtccgctcccgctacctacggcaacttcgtgctgtcccccgagaacgctgtgaccgctatctcctaccactctatcctggctgacttcaactcctacaaggctcacctgacctccggccagccccacctccccaacgactccctgagccaggctggtgctcactccctgacccccctgtccatggacgtgatccgtctgggcgaaaagaccgtgatcatggaaaacctgcgtcgcgtgtacaagaacaccgacaccaaggaccccctggaacgtaacgtggacctgaccttcttcttccccgtgggcctgtacctgcccgaggaccgtggttacaccaccgtcgagtccaaggtcaagctgaacgacaccgtgcgtaacgctctgcccaccaccgcttacctgctgaacagggaccgtgctgtgcaaaagatcgacttcgtggacgctctcaagaccctgtgccaccccgtgctgcacgagcctgctccatgcctgcaggctttcaccgagcgtggtcccccatccgagcccgctatgcagcgtctgctggaatgccgtttccagcaagagcccatgggtggtgctgctcgtcgtatcccccacttctaccgtgtgcgccgcgaggtgccccgtaccgtgaacgagatgaagcaggacttcgtggtcaccgacttctacaaggttggaaacatcaccctgtacaccgagctgcaccctttcttcgacttcacccactgccaagagaactccgagactgtggctctgtgcaccccccgtatcgtgatcggcaacctgcccgacggcctggctcccggtcccttccacgagctgaggacctgggagatcatggaacacatgcgcctgcgtcccccacccgactacgaggaaaccctgcgtctgttcaagaccaccgtgacctcccccaactaccccgagctgtgctacctggtggacgtgctggtgcacggcaacgctgacgctttcctgctgatccgcgctttcatcgctcgttgcatcgtgaacatgttccacacccgtcagctgctggtgttcgctcactcctacgctctggtcaccctgatcgctgagcacctggctgacggtgctctgcccccccagctcctgttccactaccgtaacctggtggctgtgctgcgcctggtcacccgtatctccgctctgcccggcctgaacaacggccagctggctgaggaacccctgtccgcttacgtgaacgctctgcacgaccacaggctgtggccccccttcgtgacccacctccctcgtaacatggaaggtgtccaggtggtggctgatcgtcagcccctgaaccccgctaacatcgaggctcgtcaccacggtgtctccgacgtgccccgtctgggtgctatggacgctgacgagcccctgttcgtggacgactaccgtgctaccgacgacgagtggaccctgcaaaaggtgttctacctgtgcctgatccccgctatgaccaacaaccgtgcttgcggcctgggcctgaacctcaagactctgctggtggacctgttctaccgtcccgccttcctgctcatgcccgctgctaccgctgtgtccacctccggcaccacctccaaggaatccacctctggtgtcacccccgaggactccgtggctgctcagcgtcaggctgtgggcgagatgctgaccgagctggtcgaggacgtggccaccgacgctcacacccctctgctgcaggcttgccgcgagctgttcctggctgtgcagttcgtgggcgagcacgtgaaggtgctggaagtgcgtgctcccctggaccacgctcagaggcagggactgcccgacttcatctcccgtcagcatgtgctgtacaacggttgctgcgtcgtgaccgctcctaagaccctgatcgagtactccctgcccgtgcccttccaccgtttctactccaaccccaccatctgcgctgctctgtccgacgacatcaagcgttacgtgaccgagttcccccactaccatagacacgatggtggtttccccctgcccaccgctttcgctcacgagtaccacaactggctgcgtagccccttctcccgttactccgctacctgccccaacgtgctgcactccgtgatgaccctggctgctatgctgtacaagatctcccccgtgtccctggtgctgcagaccaaggctcacatccaccccggtttcgctctgaccgctgtgcgtaccgacaccttcgaggtggacatgctgctgtactccggcaagtcctgcacctccgtcatcatcaacaaccccatcgtgaccaaggaagagagggacatctccaccacctaccacgtgacccagaacatcaacaccgtggacatgggcctgggttacacctccaacacttgcgtggcctacgtgaaccgcgtccgcaccgacatgggtgtccgtgtgcaggacctgttccgtgtgttccccatgaacgtgtaccgccacgatgaggtggaccgttggatcaggcacgctgctggcgtcgagcgtccccagctgctggacaccgagactatctccatgctgaccttcggttccatgtccgagcgcaacgctgctgctaccgtgcacggccagaaggctgtctgcgagctgatcctgacccctgtgactatggacgtgaactacttcaagatcaccaacaaccctcgtggtcgtgcttcctgcatgctgggcgtggacccctacgacaccgaggctgccaccaaggctatctacgaccaccgcgaggctgacgctcagaccttcgctgctacccacaacccatgggcttcccaggctggttgcctgtccgacgtcctgtacaacacccgtcaccgcgagcgtctgggctacaactccaagttctactccccctgcgctcagtacttcaacaccgaggaaatcatcgctgccaacaagaccctcttcaagaccatcgacgagtacctgctgcgcgctaaggactgcatccgtggcgacaccgacactcagtacgtgtgcgtcgagggaaccgagcagctgatcgagaacccttgccgtctgacccaagaggctctgcccatcctgtccaccaccaccctggctctgatggaaactaagctgaagggtggcgctggtgctttcgctacctccgagactcacttcggcaactacgtcgtgggagagatcatccccctgcagcagtccatgctgttcaacagctaagagctcaagcttgtcgagaagtactagaggatcataatcagccataccacatttgtagaggttttacttgctttaaaaaacctcccacacctccccctgaacctgaaacataaaatgaatgcaattgttgttgttaacttgtttattgcagcttataatggttacaaataaagcaatagcatcacaaatttcacaaataaagcatttttttcactgcattctagttgtggtttgtccaaactcatcaatgtatcttatcatgtctggatctgatcactgcttgagcctagaagatccggctgctaacaaagcccgaaaggaagctgagttggctgctgtggctagctttgtttaactttaagaaggagatacatctagaccggaatattaatagatcatggagataattaaaatgataaccatctcgcaaataaataagtattttactgttttcgtaacagttttgtaataaaaaaacctataaatattccggattattcataccgtcccaccatcgggcgcggatcccggtccgaagcgcgcggaattcaaaggcctacgtcgacgccaccatggaatcccgtggtcgtcgttgccccgagatgatctccgtgctgggtcccatctccggtcacgtcctgaaggctgtgttctcccgtggcgacacccccgtgctgccccacgaaactcgtctgctgcagaccggtatccacgtgcgtgtgtcccagccctccctgatcctggtgtcccagtacacccccgactccaccccttgccaccgcggagacaaccagctgcaggtccagcacacctacttcaccggttccgaggtcgagaacgtgtccgtgaacgtgcacaaccccaccggtcgttccatctgcccctcccaagagcccatgtccatctacgtgtacgctctgcccctgaagatgctgaacatcccctccatcaacgtgcaccactacccctccgctgctgagcgcaagcaccgtcacctccccgtggctgacgctgtgatccacgcttccggcaagcagatgtggcaggctcgtctgaccgtgtccggcctggcttggacccgtcagcagaaccagtggaaggaacccgacgtgtactacacctccgctttcgtgttccccaccaaggacgtggccctgcgtcacgtcgtgtgcgctcacgaactcgtgtgctccatggaaaacacccgtgctaccaagatgcaagtgatcggcgaccagtacgtgaaggtgtacctggaatccttctgcgaggacgtgccctccggcaagctgttcatgcacgtgaccctgggttccgacgtggaagaggacctgaccatgacccgtaacccccagcccttcatgcgtccccacgagcgtaacggtttcaccgtgctgtgccccaagaacatgatcatcaagcccggcaagatctcccacatcatgctggacgtggccttcacctcccacgagcacttcggcctgctgtgccctaagtccatccccggcctgtccatctccggcaacctgctgatgaacggccagcagatcttcctggaagtgcaggctatccgtgaaaccgtcgagctgcgtcagtacgaccctgtggctgctctgttcttcttcgacatcgacctgctgctgcagcgtggtccccagtactccgagcaccccaccttcaccagccagtaccgtatccagggcaagctggaataccgtcacacctgggaccgtcacgacgagggtgctgctcagggcgacgacgacgtgtggacctccggttccgactccgacgaggaactggtcaccaccgagcgcaagaccccccgtgtgaccggtggtggtgctatggctggtgcttccacctccgctggtcgcaagcgcaagtccgcttcctccgctaccgcttgcaccgctggtgtcatgacccgtggtcgcctgaaggctgagtccaccgtggctcccgaagaggacactgacgaggactccgacaacgagatccacaaccccgctgtgttcacctggcccccctggcaggctggtatcctggctcgtaacctggtgcccatggtggctaccgtgcagggccagaacctgaagtaccaagagttcttctgggacgccaacgacatctaccgtatcttcgctgagctggaaggcgtgtggcagcccgctgctcagcccaagcgtcgtcgtcaccgtcaggacgctctgcctggtccctgtatcgcttccacccccaagaagcaccgcggctaaaagcttgtcgagaagtactagaggatcataatcagccataccacatttgtagaggttttacttgctttaaaaaacctcccacacctccccctgaacctgaaacataaaatgaatgcaattgttgttgttaacttgtttattgcagcttataatggttacaaataaagcaatagcatcacaaatttcacaaataaagcatttttttcactgcattctagttgtggtttgtccaaactcatcaatgtatcttatcatgtctggatctgatcactgcttgagcctagaagatccggctgctaacaaagcccgaaaggaagctgagttggctgctgccaccgctgagcaataactatcataaccggaatattaatagatcatggagataattaaaatgataaccatctcgcaaataaataagtattttactgttttcgtaacagttttgtaataaaaaaacctataaatattccggattattcataccgtcccaccatcgggcgcggatcccggtccgaagcgcgcggaattcgccaccatgaccatggacgagcagcagccccaggctgtgacccccgtgtacgtgggcggtttcctggctcgttacgaccagtcccccgacgaggctgagctgctgctgccacgtgacgtggtcgaacactggctgcacgctcagggccagggacagccttccctgtccgtggctctgcccctgaacatcaaccacgacgacaccgctgtcgtgggtcacgtggccgctatgcagtccgtgcgtgacggcctgttctgcctgggttgcgtgacctccccccgtttcctggaaatcgtgcgtcgtgcttccgagaagtccgagctggtgtcccgtggtcccgtgtccccactgcagcccgacaaggtggtcgagttcctgtccggttcctacgctggcctgtccctgtcatcccgtcgttgcgacgacgtcgaggctgctacctccctgagcggctccgagactacccccttcaagcacgtggccctgtgctccgtgggtcgtaggcgtggaaccctggctgtgtacggtcgtgaccccgagtgggtcacccagcgtttccccgacctgaccgctgctgaccgtgacggactgcgtgctcagtggcagcgttgcggttccaccgctgtggacgcttccggcgaccccttccgttccgactcctacggcctgctgggcaactccgtggacgctctgtacatccgcgagcgtctgcccaagctgcgttacgacaagcagctcgtgggtgtcaccgagcgcgagtcctacgtgaaggcttccgtgtcccccgaggctgcttgcgacatcaaggctgcttccgctgagcgttctggcgacagccgctcccaggctgctactcctgctgctggtgctcgtgtgccctccagctccccatccccacctgtcgagcctccctcccccgtgcaacctcctgctctgcctgcttccccctccgtgctgcctgctgagtccagcccctccctgtcaccctctgagcctgctgaggctgcctccatgtcccaccctctgagcgctgctgtgactgctgctaccgctccccctggtgctactgtggctggtgcttcccccgctgtgccttccctggcttggcctcacgacggtgtctacctgcccaaggacgctttcttctccctgctgggcgcttcccgttccgctgctcccgtgatgtaccccggtgctgtggctgctccccccagcgcttcacctgctcctctgcccctgccctcctaccccgcttcctacggtgctcccgtcgtgggttacgaccagctggctgctcgtcacttcgctgactacgtggacccccactaccccggctggggtcgtcgttacgagcccgctccttccctgcacccatcctaccctgtgccccctcctccatcacccgcttactaccgtcgtcgtgactcccccggtggcatggacgagcctccatctggatgggagcgttacgacggttcccaccgtggccagtcccaaaagcagcaccgtcacggtggttccggtggtcacaacaagcgtcgcaaggaagccgctgctgcatcctccagctccgacgaggacctgagcttccccggcgaggctgaacacggtcgtgctcgcaagcgtctgaagtcccacgtgaactccgacggaggtagcggaggccacgctggttccaaccagcagcagcaacagcgctacgacgagctgcgtgacgctatccacgagctgaagcgtgacctgttcgctgctcgccagtcctccaccctgctgtctgctgctctgccagctgccgcttcttcctcccctaccaccaccaccgtgtgcacccctactggcgagctgacctctggtggtggcgagactcccaccgctctgctgtccggtggtgctaaggtggccgagcgtgctcaggctggtgtcgtgaacgcttcctgccgtctggctaccgcttccggttccgaggctgccaccgctggtccctctaccgctggttcctcatcctgcccagcttccgtggtgctggctgccgctgctgctcaagccgccgctgcttcacagtcccccccaaaggatatggtggacctgaaccgtcgtatcttcgtggctgctctgaacaagctcgagtaataaaagcttgtcgagaagtactagaggatcataatcagccataccacatttgtagaggttttacttgctttaaaaaacctcccacacctccccctgaacctgaaacataaaatgaatgcaattgttgttgttaacttgtttattgcagcttataatggttacaaataaagcaatagcatcacaaatttcacaaataaagcatttttttcactgcattctagttgtggtttgtccaaactcatcaatgtatcttatcatgtctggatctgatcactgcttgagcctagaagatccggctgctaacaaagcccgaaaggaagctgggaatattaatagatcatggagataattaaaatgataaccatctcgcaaataaataagtattttactgttttcgtaacagttttgtaataaaaaaacctataaatattccggattattcataccgtcccaccatcgggcgcggatccgccaccatggctgctatggaagctaacatcttctgcaccttcgaccacaagctgtctatcgctgacgtgggcaagctgaccaagctggtggctgctgtggtgcccatcccccagcgtctgcacctgatcaagcactaccagctgggcctgcaccagttcgtggaccacacccgtggttacgtgcgtctgcgtggcctgctgcgtaacatgaccctgaccctgatgcgtcgtgtcgagggcaaccagatcctgctgcacgtgcccacccacggcctgctgtacaccgtgctgaacaccggtcccgtgacctgggagaagggcgacgctctgtgcgtgctgccccccctgttccacggtcccctggctcgtgaaaacctgttgaccctgggccagtgggagctggtgctgccctggatcgtgcccatgcccctggctctggaaatcaaccagcgcctgctgatcatgggcctgttctccctggaccgttcctacgaagaagtgaaggctgctgtccagcagctgcagaccatcaccttccgtgacgctaccttcaccatccccgaccccgtgatcgaccagcacctcctgatcgacatgaagaccgcttgcctgtccatgtccatggtggctaacctggcttccgagctgaccatgacctacgtccgcaagctggctttggaggactcttccatgctgctggtcaagtgccaagagctgctgatgcgtctggaccgcgagcgttccgtgggcgagcctcgtactcccgctcgtcctcagcacgtgtcccccgacgacgagatcgctcgtctgtccgctctgttcgtgatgctgcgtcagctggacgacctgatccgcgagcaggtcgtgttcaccgtgtgcgacgtgagcccagacaacaagtccgctacctgcatcttcaagggctaaggcgcgccaagcttgtcgagaagtactagaggatcataatcagccataccacatttgtagaggttttacttgctttaaaaaacctcccacacctccccctgaacctgaaacataaaatgaatgcaattgttgttgttaacttgtttattgcagcttataatggttacaaataaagcaatagcatcacaaatttcacaaataaagcatttttttcactgcattctagttgtggtttgtccaaactcatcaatgtatcttatcatgtctggatctgatcactgcttgagcctagaagatccggctgctaacaaagcccgaaaggaagctgagttggctgctgccaccgctgagcaataactatcataacccctaggagatccgaaccagataagtgaaatctagttccaaactattttgtcatttttaattttcgtattagcttacgacgctacacccagttcccatctattttgtcactcttccctaaataatccttaaaaactccatttccacccctcccagttcccaactattttgtccgcccaca

SEQ ID NO: 74 - DNA, 15813 bp, Artificial Sequence
  Synthetic construct
ttgttccagtttggaacaagagtccactattaaagaacgtggactccaacgtcaaagggcgaaaaaccgtctatcagggcgatggcccactacgtgaaccatcaccctaatcaagttttttggggtcgaggtgccgtaaagcactaaatcggaaccctaaagggagcccccgatttagagcttgacggggaaagccggcgaacgtggcgagaaaggaagggaagaaagcgaaaggagcgggcgctagggcgctggcaagtgtagcggtcacgctgcgcgtaaccaccacacccgccgcgcttaatgcgccgctacagggcgcgtcgcgccattcgccattcaggctgcgcaactgttgggaagggcgatcggtgcgggcctcttcgctattacgccagctggcgaaagggggatgtgctgcaaggcgattaagttgggtaacgccagggttttcccagtcacgacgttgtaaaacgacggccagtgcatagaccagccgcgtaacctggcaaaatcggttacggttgagtaataaatggatgccctgcgtaagcgggtgtgggcggacaataaagtcttaaactgaacaaaatagatctaaactatgacaataaagtcttaaactagacagaatagttgtaaactgaaatcagtccagttatgctgtgaaaaagcatactggacttttgttatggctaaagcaaactcttcattttctgaagtgcaaattgcccgtcgtattaaagaggggcgtggccaagggcatggtaaagactatattcgcggcgttgtgacaatttaccgaacaactccgcggccgggaagccgatctcggcttgaacgaattgttaggtggcggtacttgggtcgatatcaaagtgcatcacttcttcccgtatgcccaactttgtatagagagccactgcgggatcgtcaccgtaatctgcttgcacgtagatcacataagcaccaagcgcgttggcctcatgcttgaggagattgatgagcgcggtggcaatgccctgcctccggtgctcgccggagactgcgagatcatagatatagatctcactacgcggctgctcaaacttgggcagaacgtaagccgcgagagcgccaacaaccgcttcttggtcgaaggcagcaagcgcgatgaatgtcttactacggagcaagttcccgaggtaatcggagtccggctgatgttgggagtaggtggctacgtctccgaactcacgaccgaaaagatcaagagcagcccgcatggatttgacttggtcagggccgagcctacatgtgcgaatgatgcccatacttgagccacctaactttgttttagggcgactgccctgctgcgtaacatcgttgctgctgcgtaacatcgttgctgctccataacatcaaacatcgacccacggcgtaacgcgcttgctgcttggatgcccgaggcatagactgtacaaaaaaacagtcataacaagccatgaaaaccgccactgcgccgttaccaccgctgcgttcggtcaaggttctggaccagttgcgtgagcgcatacgctacttgcattacagtttacgaaccgaacaggcttatgtcaactgggttcgtgccttcatccgtttccacggtgtgcgtcacccggcaaccttgggcagcagcgaagtcgaggcatttctgtcctggctggcgaacgagcgcaaggtttcggtctccacgcatcgtcaggcattggcggccttgctgttcttctacggcaaggtgctgtgcacggatctgcccttgcttcaggagatcggtagacctcggccgtcgcggcgcttgccggtggtgctgaccccggatgaagtggttcgcatcctcggttttctggaaggcgagcatcgtttgttcgcccaggactctagctatagttctagtggttggctacagctttgtttgtactatcaacaggttgaactgctgatcaacagatcctctacgcggccgcggtaccataacttcgtatagcatacattatacgaagttatctggtttaaacgtacccgtagtggctatggcagggcttgccgccccgacgttggctgcgagccctgggccttcacccgaacttgggggttggggtggggaaaaggaagaaacgcgggcgtattggtcccaatggggtctcggtggggtatcgacagagtgccagccctgggaccgaaccccgcgtttatgaacaaacgacccaacacccgtgcgttttattctgtctttttattgccgtcatagcgcgggttccttccggtattgtctccttccgtgtttcagttagcctcccccatctcccggtaccgcatgctatgcatcagctgctagcaccatggctcgagatcccgggtgatcaagtcttcgtcgagtgattgtaaataaaatgtaatttacagtatagtattttaattaatatacaaatgatttgataataattcttatttaactataatatattgtgttgggttgaattaaaggtccgtatactagtatcgattcgcgacctactccggaatattaatagatcatggagataattaaaatgataaccatctcgcaaataaataagtattttactgttttcgtaacagttttgtaataaaaaaacctataaatattccggattattcataccgtcccaccatcgggcgcggatccgccaccatggaaaactggtccgctctggaactgctgcccaaggtcggaatccctaccgacttcctgacccacgtcaagacctccgctggcgaggaaatgttcgaggctctgaggatctactacggcgacgaccccgagcgttacaacatccacttcgaggctatcttcggcaccttctgcaaccgtctggaatgggtgtacttcctgacttccggcctggctgctgctgctcacgctatcaagttccacgacctgaacaagctgaccaccggcaagatgctgttccacgtgcaagtgccccgtgtggcttccggtgctggcctgcctacctcccgtcagaccaccatcatggtcaccaagtactccgagaagtcccccatcaccatccctttcgagctgtccgctgcttgcctgacttacctgcgtgaaaccttcgagggcaccatcctggacaagatcctgaacgtcgaggctatgcacaccgtgctgcgtgctctgaagaacaccgctgacgctatggaacgtggcctgatccacagcttcctccagaccctgctgaggaaggctcccccctacttcgtggtgcagaccctggtcgagaacgctaccctggctcgtcaggctctgaaccgtatccagcgctccaacatcctgcagtccttcaaggctaagatgctggctaccctgttcctgctgaaccgtacccgtgaccgtgactacgtgctgaagttcctgacccgtctggctgaggctgctaccgactccatcctcgacaaccctactacctacaccacctcctccggtgctaagatctccggtgtcatggtgtccaccgctaacgtgatgcagatcatcatgtccctgctgtcctcccacatcactaaggaaaccgtgtccgctcccgctacctacggcaacttcgtgctgtcccccgagaacgctgtgaccgctatctcctaccactctatcctggctgacttcaactcctacaaggctcacctgacctccggccagccccacctccccaacgactccctgagccaggctggtgctcactccctgacccccctgtccatggacgtgatccgtctgggcgaaaagaccgtgatcatggaaaacctgcgtcgcgtgtacaagaacaccgacaccaaggaccccctggaacgtaacgtggacctgaccttcttcttccccgtgggcctgtacctgcccgaggaccgtggttacaccaccgtcgagtccaaggtcaagctgaacgacaccgtgcgtaacgctctgcccaccaccgcttacctgctgaacagggaccgtgctgtgcaaaagatcgacttcgtggacgctctcaagaccctgtgccaccccgtgctgcacgagcctgctccatgcctgcaggctttcaccgagcgtggtcccccatccgagcccgctatgcagcgtctgctggaatgccgtttccagcaagagcccatgggtggtgctgctcgtcgtatcccccacttctaccgtgtgcgccgcgaggtgccccgtaccgtgaacgagatgaagcaggacttcgtggtcaccgacttctacaaggttggaaacatcaccctgtacaccgagctgcaccctttcttcgacttcacccactgccaagagaactccgagactgtggctctgtgcaccccccgtatcgtgatcggcaacctgcccgacggcctggctcccggtcccttccacgagctgaggacctgggagatcatggaacacatgcgcctgcgtcccccacccgactacgaggaaaccctgcgtctgttcaagaccaccgtgacctcccccaactaccccgagctgtgctacctggtggacgtgctggtgcacggcaacgctgacgctttcctgctgatccgcgctttcatcgctcgttgcatcgtgaacatgttccacacccgtcagctgctggtgttcgctcactcctacgctctggtcaccctgatcgctgagcacctggctgacggtgctctgcccccccagctcctgttccactaccgtaacctggtggctgtgctgcgcctggtcacccgtatctccgctctgcccggcctgaacaacggccagctggctgaggaacccctgtccgcttacgtgaacgctctgcacgaccacaggctgtggccccccttcgtgacccacctccctcgtaacatggaaggtgtccaggtggtggctgatcgtcagcccctgaaccccgctaacatcgaggctcgtcaccacggtgtctccgacgtgccccgtctgggtgctatggacgctgacgagcccctgttcgtggacgactaccgtgctaccgacgacgagtggaccctgcaaaaggtgttctacctgtgcctgatccccgctatgaccaacaaccgtgcttgcggcctgggcctgaacctcaagactctgctggtggacctgttctaccgtcccgccttcctgctcatgcccgctgctaccgctgtgtccacctccggcaccacctccaaggaatccacctctggtgtcacccccgaggactccgtggctgctcagcgtcaggctgtgggcgagatgctgaccgagctggtcgaggacgtggccaccgacgctcacacccctctgctgcaggcttgccgcgagctgttcctggctgtgcagttcgtgggcgagcacgtgaaggtgctggaagtgcgtgctcccctggaccacgctcagaggcagggactgcccgacttcatctcccgtcagcatgtgctgtacaacggttgctgcgtcgtgaccgctcctaagaccctgatcgagtactccctgcccgtgcccttccaccgtttctactccaaccccaccatctgcgctgctctgtccgacgacatcaagcgttacgtgaccgagttcccccactaccatagacacgatggtggtttccccctgcccaccgctttcgctcacgagtaccacaactggctgcgtagccccttctcccgttactccgctacctgccccaacgtgctgcactccgtgatgaccctggctgctatgctgtacaagatctcccccgtgtccctggtgctgcagaccaaggctcacatccaccccggtttcgctctgaccgctgtgcgtaccgacaccttcgaggtggacatgctgctgtactccggcaagtcctgcacctccgtcatcatcaacaaccccatcgtgaccaaggaagagagggacatctccaccacctaccacgtgacccagaacatcaacaccgtggacatgggcctgggttacacctccaacacttgcgtggcctacgtgaaccgcgtccgcaccgacatgggtgtccgtgtgcaggacctgttccgtgtgttccccatgaacgtgtaccgccacgatgaggtggaccgttggatcaggcacgctgctggcgtcgagcgtccccagctgctggacaccgagactatctccatgctgaccttcggttccatgtccgagcgcaacgctgctgctaccgtgcacggccagaaggctgtctgcgagctgatcctgacccctgtgactatggacgtgaactacttcaagatcaccaacaaccctcgtggtcgtgcttcctgcatgctgggcgtggacccctacgacaccgaggctgccaccaaggctatctacgaccaccgcgaggctgacgctcagaccttcgctgctacccacaacccatgggcttcccaggctggttgcctgtccgacgtcctgtacaacacccgtcaccgcgagcgtctgggctacaactccaagttctactccccctgcgctcagtacttcaacaccgaggaaatcatcgctgccaacaagaccctcttcaagaccatcgacgagtacctgctgcgcgctaaggactgcatccgtggcgacaccgacactcagtacgtgtgcgtcgagggaaccgagcagctgatcgagaacccttgccgtctgacccaagaggctctgcccatcctgtccaccaccaccctggctctgatggaaactaagctgaagggtggcgctggtgctttcgctacctccgagactcacttcggcaactacgtcgtgggagagatcatccccctgcagcagtccatgctgttcaacagctaagagctcaagcttgtcgagaagtactagaggatcataatcagccataccacatttgtagaggttttacttgctttaaaaaacctcccacacctccccctgaacctgaaacataaaatgaatgcaattgttgttgttaacttgtttattgcagcttataatggttacaaataaagcaatagcatcacaaatttcacaaataaagcatttttttcactgcattctagttgtggtttgtccaaactcatcaatgtatcttatcatgtctggatctgatcactgcttgagcctagaagatccggctgctaacaaagcccgaaaggaagctgagttggctgctgtggctagctttgtttaactttaagaaggagatacatctagaccggaatattaatagatcatggagataattaaaatgataaccatctcgcaaataaataagtattttactgttttcgtaacagttttgtaataaaaaaacctataaatattccggattattcataccgtcccaccatcgggcgcggatcccggtccgaagcgcgcggaattcaaaggcctacgtcgacgccaccatggaatcccgtggtcgtcgttgccccgagatgatctccgtgctgggtcccatctccggtcacgtcctgaaggctgtgttctcccgtggcgacacccccgtgctgccccacgaaactcgtctgctgcagaccggtatccacgtgcgtgtgtcccagccctccctgatcctggtgtcccagtacacccccgactccaccccttgccaccgcggagacaaccagctgcaggtccagcacacctacttcaccggttccgaggtcgagaacgtgtccgtgaacgtgcacaaccccaccggtcgttccatctgcccctcccaagagcccatgtccatctacgtgtacgctctgcccctgaagatgctgaacatcccctccatcaacgtgcaccactacccctccgctgctgagcgcaagcaccgtcacctccccgtggctgacgctgtgatccacgcttccggcaagcagatgtggcaggctcgtctgaccgtgtccggcctggcttggacccgtcagcagaaccagtggaaggaacccgacgtgtactacacctccgctttcgtgttccccaccaaggacgtggccctgcgtcacgtcgtgtgcgctcacgaactcgtgtgctccatggaaaacacccgtgctaccaagatgcaagtgatcggcgaccagtacgtgaaggtgtacctggaatccttctgcgaggacgtgccctccggcaagctgttcatgcacgtgaccctgggttccgacgtggaagaggacctgaccatgacccgtaacccccagcccttcatgcgtccccacgagcgtaacggtttcaccgtgctgtgccccaagaacatgatcatcaagcccggcaagatctcccacatcatgctggacgtggccttcacctcccacgagcacttcggcctgctgtgccctaagtccatccccggcctgtccatctccggcaacctgctgatgaacggccagcagatcttcctggaagtgcaggctatccgtgaaaccgtcgagctgcgtcagtacgaccctgtggctgctctgttcttcttcgacatcgacctgctgctgcagcgtggtccccagtactccgagcaccccaccttcaccagccagtaccgtatccagggcaagctggaataccgtcacacctgggaccgtcacgacgagggtgctgctcagggcgacgacgacgtgtggacctccggttccgactccgacgaggaactggtcaccaccgagcgcaagaccccccgtgtgaccggtggtggtgctatggctggtgcttccacctccgctggtcgcaagcgcaagtccgcttcctccgctaccgcttgcaccgctggtgtcatgacccgtggtcgcctgaaggctgagtccaccgtggctcccgaagaggacactgacgaggactccgacaacgagatccacaaccccgctgtgttcacctggcccccctggcaggctggtatcctggctcgtaacctggtgcccatggtggctaccgtgcagggccagaacctgaagtaccaagagttcttctgggacgccaacgacatctaccgtatcttcgctgagctggaaggcgtgtggcagcccgctgctcagcccaagcgtcgtcgtcaccgtcaggacgctctgcctggtccctgtatcgcttccacccccaagaagcaccgcggctaaaagcttgtcgagaagtactagaggatcataatcagccataccacatttgtagaggttttacttgctttaaaaaacctcccacacctccccctgaacctgaaacataaaatgaatgcaattgttgttgttaacttgtttattgcagcttataatggttacaaataaagcaatagcatcacaaatttcacaaataaagcatttttttcactgcattctagttgtggtttgtccaaactcatcaatgtatcttatcatgtctggatctgatcactgcttgagcctagaagatccggctgctaacaaagcccgaaaggaagctgagttggctgctgccaccgctgagcaataactatcataaccggaatattaatagatcatggagataattaaaatgataaccatctcgcaaataaataagtattttactgttttcgtaacagttttgtaataaaaaaacctataaatattccggattattcataccgtcccaccatcgggcgcggatcccggtccgaagcgcgcggaattcgccaccatgaccatggacgagcagcagccccaggctgtgacccccgtgtacgtgggcggtttcctggctcgttacgaccagtcccccgacgaggctgagctgctgctgccacgtgacgtggtcgaacactggctgcacgctcagggccagggacagccttccctgtccgtggctctgcccctgaacatcaaccacgacgacaccgctgtcgtgggtcacgtggccgctatgcagtccgtgcgtgacggcctgttctgcctgggttgcgtgacctccccccgtttcctggaaatcgtgcgtcgtgcttccgagaagtccgagctggtgtcccgtggtcccgtgtccccactgcagcccgacaaggtggtcgagttcctgtccggttcctacgctggcctgtccctgtcatcccgtcgttgcgacgacgtcgaggctgctacctccctgagcggctccgagactacccccttcaagcacgtggccctgtgctccgtgggtcgtaggcgtggaaccctggctgtgtacggtcgtgaccccgagtgggtcacccagcgtttccccgacctgaccgctgctgaccgtgacggactgcgtgctcagtggcagcgttgcggttccaccgctgtggacgcttccggcgaccccttccgttccgactcctacggcctgctgggcaactccgtggacgctctgtacatccgcgagcgtctgcccaagctgcgttacgacaagcagctcgtgggtgtcaccgagcgcgagtcctacgtgaaggcttccgtgtcccccgaggctgcttgcgacatcaaggctgcttccgctgagcgttctggcgacagccgctcccaggctgctactcctgctgctggtgctcgtgtgccctccagctccccatccccacctgtcgagcctccctcccccgtgcaacctcctgctctgcctgcttccccctccgtgctgcctgctgagtccagcccctccctgtcaccctctgagcctgctgaggctgcctccatgtcccaccctctgagcgctgctgtgactgctgctaccgctccccctggtgctactgtggctggtgcttcccccgctgtgccttccctggcttggcctcacgacggtgtctacctgcccaaggacgctttcttctccctgctgggcgcttcccgttccgctgctcccgtgatgtaccccggtgctgtggctgctccccccagcgcttcacctgctcctctgcccctgccctcctaccccgcttcctacggtgctcccgtcgtgggttacgaccagctggctgctcgtcacttcgctgactacgtggacccccactaccccggctggggtcgtcgttacgagcccgctccttccctgcacccatcctaccctgtgccccctcctccatcacccgcttactaccgtcgtcgtgactcccccggtggcatggacgagcctccatctggatgggagcgttacgacggttcccaccgtggccagtcccaaaagcagcaccgtcacggtggttccggtggtcacaacaagcgtcgcaaggaagccgctgctgcatcctccagctccgacgaggacctgagcttccccggcgaggctgaacacggtcgtgctcgcaagcgtctgaagtcccacgtgaactccgacggaggtagcggaggccacgctggttccaaccagcagcagcaacagcgctacgacgagctgcgtgacgctatccacgagctgaagcgtgacctgttcgctgctcgccagtcctccaccctgctgtctgctgctctgccagctgccgcttcttcctcccctaccaccaccaccgtgtgcacccctactggcgagctgacctctggtggtggcgagactcccaccgctctgctgtccggtggtgctaaggtggccgagcgtgctcaggctggtgtcgtgaacgcttcctgccgtctggctaccgcttccggttccgaggctgccaccgctggtccctctaccgctggttcctcatcctgcccagcttccgtggtgctggctgccgctgctgctcaagccgccgctgcttcacagtcccccccaaaggatatggtggacctgaaccgtcgtatcttcgtggctgctctgaacaagctcgagtaataaaagcttgtcgagaagtactagaggatcataatcagccataccacatttgtagaggttttacttgctttaaaaaacctcccacacctccccctgaacctgaaacataaaatgaatgcaattgttgttgttaacttgtttattgcagcttataatggttacaaataaagcaatagcatcacaaatttcacaaataaagcatttttttcactgcattctagttgtggtttgtccaaactcatcaatgtatcttatcatgtctggatctgatcactgcttgagcctagaagatccggctgctaacaaagcccgaaaggaagctgggaatattaatagatcatggagataattaaaatgataaccatctcgcaaataaataagtattttactgttttcgtaacagttttgtaataaaaaaacctataaatattccggattattcataccgtcccaccatcgggcgcggatccgccaccatggctgctatggaagctaacatcttctgcaccttcgaccacaagctgtctatcgctgacgtgggcaagctgaccaagctggtggctgctgtggtgcccatcccccagcgtctgcacctgatcaagcactaccagctgggcctgcaccagttcgtggaccacacccgtggttacgtgcgtctgcgtggcctgctgcgtaacatgaccctgaccctgatgcgtcgtgtcgagggcaaccagatcctgctgcacgtgcccacccacggcctgctgtacaccgtgctgaacaccggtcccgtgacctgggagaagggcgacgctctgtgcgtgctgccccccctgttccacggtcccctggctcgtgaaaacctgttgaccctgggccagtgggagctggtgctgccctggatcgtgcccatgcccctggctctggaaatcaaccagcgcctgctgatcatgggcctgttctccctggaccgttcctacgaagaagtgaaggctgctgtccagcagctgcagaccatcaccttccgtgacgctaccttcaccatccccgaccccgtgatcgaccagcacctcctgatcgacatgaagaccgcttgcctgtccatgtccatggtggctaacctggcttccgagctgaccatgacctacgtccgcaagctggctttggaggactcttccatgctgctggtcaagtgccaagagctgctgatgcgtctggaccgcgagcgttccgtgggcgagcctcgtactcccgctcgtcctcagcacgtgtcccccgacgacgagatcgctcgtctgtccgctctgttcgtgatgctgcgtcagctggacgacctgatccgcgagcaggtcgtgttcaccgtgtgcgacgtgagcccagacaacaagtccgctacctgcatcttcaagggccagctgttgaattttgaccttcttaagcttgcgggagacgtcgagtccaaccctgggcccatggccccctcccacgtggacaaggtgaacacccgcacctggtccgcctccatcgtgttcatggtgctgaccttcgtgaacgtgtccgtgcacctggtgctgtccaacttcccccacctgggctacccctgcgtgtactaccacgtggtggacttcgagcgcctgaacatgtccgcctacaacgtgatgcacctgcacacccccatgctgttcctggactccgtgcagctggtgtgctacgccgtgttcatgcagctggtgttcctggccgtgaccatctactacctggtgtgctggatcaagatctccatgcgcaaggacaagggcatgtccctgaaccagtccacccgcgacatctcctacatgggcgactccctgaccgccttcctgttcatcctgtccatggacaccttccagctgttcaccctgaccatgtccttccgcctgccctccatgatcgccttcatggccgccgtgcacttcttctgcctgaccatcttcaacgtgtccatggtgacccagtaccgctcctacaagcgctccctgttcttcttctcccgcctgcaccccaagctgaagggcaccgtgcagttccgcaccctgatcgtgaacctggtggaggtggccctgggcttcaacaccaccgtggtggccatggccctgtgctacggcttcggcaacaacttcttcgtgcgcaccggccacatggtgctggccgtgttcgtggtgtacgccatcatctccatcatctacttcctgctgatcgaggccgtgttcttccagtacgtgaaggtgcagttcggctaccacctgggcgccttcttcggcctgtgcggcctgatctaccccatcgtgcagtacgacaccttcctgtccaacgagtaccgcaccggcatctcctggtccttcggcatgctgttcttcatctgggccatgttcaccacctgccgcgccgtgcgctacttccgcggccgcggctccggctccgtgaagtaccaggccctggccaccgcctccggcgaggaggtggccgccctgtcccaccacgactccctggagtcccgccgcctgcgcgaggaggaggacgacgacgacgacgaggacttcgaggacgcctaagagctcaagcttgtcgagaagtactagaggatcataatcagccataccacatttgtagaggttttacttgctttaaaaaacctcccacacctccccctgaacctgaaacataaaatgaatgcaattgttgttgttaacttgtttattgcagcttataatggttacaaataaagcaatagcatcacaaatttcacaaataaagcatttttttcactgcattctagttgtggtttgtccaaactcatcaatgtatcttatcatgtctggatctgatcactgcttgagcctagaagatccggctgctaacaaagcccgaaaggaagctgagttggctgctgtggctagctttgtttaactttaagaaggagatacatctagaaatattaatagatcatggagataattaaaatgataaccatctcgcaaataaataagtattttactgttttcgtaacagttttgtaataaaaaaacctataaatattccggattattcataccgtcccaccatcgggcgcggatcccggtccgaagcgcgcggaattcaaaggcctacgccaccatggagtggaacacactagtactaggtcttttggttttatcggtagcggcaagttccaaccatacgtcgactgctagcacaccgagtccctctagctctactcacacctcaacgaccgtgaaggcaacgactactgcgacaactagtacaactacggtgacaagtacgacttcatcaacgactagtaccaaacccggttccaccactcacgaccccaatgtgatgagaccacatgctcacaatgatttttacaaggcgcattgtacatcgcatatgtatgaactttctctgtccagctttgcggcctggtggactatgcttaatgctctcattctcatgggagctttttgtatcgtactacgacattgctgtttccagaactttactgcaaccaccaccaaaggctattgataaaagcttgtcgagaagtactagaggatcataatcagccataccacatttgtagaggttttacttgctttaaaaaacctcccacacctccccctgaacctgaaacataaaatgaatgcaattgttgttgttaacttgtttattgcagcttataatggttacaaataaagcaatagcatcacaaatttcacaaataaagcatttttttcactgcattctagttgtggtttgtccaaactcatcaatgtatcttatcatgtctggatctgatcactgcttgagcctagaagatccggctgctaacaaagcccgaaaggaagctgagttggctgctgccaccgctgagcaataactatcataacccctaggagatccgaaccagataagtgaaatctagttccaaactattttgtcatttttaattttcgtattagcttacgacgctacacccagttcccatctattttgtcactcttccctaaataatccttaaaaactccatttccacccctcccagttcccaactattttgtccgcccaca

SEQ ID NO: 75 - DNA, 16020 bp, Artificial Sequence
  Synthetic construct
ttgttccagtttggaacaagagtccactattaaagaacgtggactccaacgtcaaagggcgaaaaaccgtctatcagggcgatggcccactacgtgaaccatcaccctaatcaagttttttggggtcgaggtgccgtaaagcactaaatcggaaccctaaagggagcccccgatttagagcttgacggggaaagccggcgaacgtggcgagaaaggaagggaagaaagcgaaaggagcgggcgctagggcgctggcaagtgtagcggtcacgctgcgcgtaaccaccacacccgccgcgcttaatgcgccgctacagggcgcgtcgcgccattcgccattcaggctgcgcaactgttgggaagggcgatcggtgcgggcctcttcgctattacgccagctggcgaaagggggatgtgctgcaaggcgattaagttgggtaacgccagggttttcccagtcacgacgttgtaaaacgacggccagtgcatagaccagccgcgtaacctggcaaaatcggttacggttgagtaataaatggatgccctgcgtaagcgggtgtgggcggacaataaagtcttaaactgaacaaaatagatctaaactatgacaataaagtcttaaactagacagaatagttgtaaactgaaatcagtccagttatgctgtgaaaaagcatactggacttttgttatggctaaagcaaactcttcattttctgaagtgcaaattgcccgtcgtattaaagaggggcgtggccaagggcatggtaaagactatattcgcggcgttgtgacaatttaccgaacaactccgcggccgggaagccgatctcggcttgaacgaattgttaggtggcggtacttgggtcgatatcaaagtgcatcacttcttcccgtatgcccaactttgtatagagagccactgcgggatcgtcaccgtaatctgcttgcacgtagatcacataagcaccaagcgcgttggcctcatgcttgaggagattgatgagcgcggtggcaatgccctgcctccggtgctcgccggagactgcgagatcatagatatagatctcactacgcggctgctcaaacttgggcagaacgtaagccgcgagagcgccaacaaccgcttcttggtcgaaggcagcaagcgcgatgaatgtcttactacggagcaagttcccgaggtaatcggagtccggctgatgttgggagtaggtggctacgtctccgaactcacgaccgaaaagatcaagagcagcccgcatggatttgacttggtcagggccgagcctacatgtgcgaatgatgcccatacttgagccacctaactttgttttagggcgactgccctgctgcgtaacatcgttgctgctgcgtaacatcgttgctgctccataacatcaaacatcgacccacggcgtaacgcgcttgctgcttggatgcccgaggcatagactgtacaaaaaaacagtcataacaagccatgaaaaccgccactgcgccgttaccaccgctgcgttcggtcaaggttctggaccagttgcgtgagcgcatacgctacttgcattacagtttacgaaccgaacaggcttatgtcaactgggttcgtgccttcatccgtttccacggtgtgcgtcacccggcaaccttgggcagcagcgaagtcgaggcatttctgtcctggctggcgaacgagcgcaaggtttcggtctccacgcatcgtcaggcattggcggccttgctgttcttctacggcaaggtgctgtgcacggatctgcccttgcttcaggagatcggtagacctcggccgtcgcggcgcttgccggtggtgctgaccccggatgaagtggttcgcatcctcggttttctggaaggcgagcatcgtttgttcgcccaggactctagctatagttctagtggttggctacagctttgtttgtactatcaacaggttgaactgctgatcaacagatcctctacgcggccgcggtaccataacttcgtatagcatacattatacgaagttatctggtttaaacgtacccgtagtggctatggcagggcttgccgccccgacgttggctgcgagccctgggccttcacccgaacttgggggttggggtggggaaaaggaagaaacgcgggcgtattggtcccaatggggtctcggtggggtatcgacagagtgccagccctgggaccgaaccccgcgtttatgaacaaacgacccaacacccgtgcgttttattctgtctttttattgccgtcatagcgcgggttccttccggtattgtctccttccgtgtttcagttagcctcccccatctcccggtaccgcatgctatgcatcagctgctagcttactgcagccaccaccacagggagttcagggtggacaggttcacagcacgacggtgctcagggggggtcaggttgccgtaggtggaggactgcaggctgaagttacggatctcagacaggaacagcagggagtccaggtagtcccacatggggtcgatgaaggtgcgctggaaacgggtggatggggaggtgggggtggtcttgttgttgtcggaagcagtctcgttctcgacgggcatggtgtcgttgtagtacagggaggacatgtccagggtgccgtagatggtgtagggagtctcgttacggatcagcacgtgagtgttcttcatgaactcggacacagcggtacggttacggttgggcttgcagaagggctcgtcacggtaacgcagggtggtgtacacccaggtagccaggtccttcagctgagtggtcaggatagacttcatgaagttctcgtcgggacggtaaccgatggtagaggtggggatacgggtgggcacgatgggggagtaggtcacgttggtggaaacgttgaagatggtggaggtgtaggaggagtagggggtagtagtgctgacgcgggacttcttggagatggacttcacgggagcctgcttgcgcttcagcttgcgcatggtgttcttcagcttggtggagttgatgtacttgggcacacggaagatgttacgggacatagcgttgaccaggtagaaggaacgggtgcagttgcgctgagcgtaacgcagcagcagagcagccaggcccaggaagtagatagtctgggagtccacgttgaccttggaggggcccacgtacagcttggtgttccaacggggcacgttgaagaacatggggttgaaggtggtgaagttgccgcagttttcctcgccggtgttgttacgacgggacacgttcagcatctcggacaggcaggtcatggaggggatggtgccgcaagaggggggacggaaggtgatcttctggccggtgtggttgtactcggagtacacgtacttagcgggcttgcgcagctgggtggtgtggaagtcgaaccacaggtgggtgatggagtggttacggatgggaccagccaggatggagttgggggggaactgcttcatctcgacggtgatgttgtacagcttctgctggctggggaaggtgaagaacttgtagtagtcgccggtcttggaagccagctcttgcaggatacgcagcttcagctggcgttcctcttccttagccttctgggacttcacacggaaacgagccacagcgatcttgcagttgatgaagctgaacagcaggaaggtcagggacatcaggaagaacaggttgaacacgccacgcatctcgcccttgcgacccatggtggcctcgagatcccgggtgatcaagtcttcgtcgagtgattgtaaataaaatgtaatttacagtatagtattttaattaatatacaaatgatttgataataattcttatttaactataatatattgtgttgggttgaattaaaggtccgtatactagtatcgattcgcgacctactccggaatattaatagatcatggagataattaaaatgataaccatctcgcaaataaataagtattttactgttttcgtaacagttttgtaataaaaaaacctataaatattccggattattcataccgtcccaccatcgggcgcggatccgccaccatggaaaactggtccgctctggaactgctgcccaaggtcggaatccctaccgacttcctgacccacgtcaagacctccgctggcgaggaaatgttcgaggctctgaggatctactacggcgacgaccccgagcgttacaacatccacttcgaggctatcttcggcaccttctgcaaccgtctggaatgggtgtacttcctgacttccggcctggctgctgctgctcacgctatcaagttccacgacctgaacaagctgaccaccggcaagatgctgttccacgtgcaagtgccccgtgtggcttccggtgctggcctgcctacctcccgtcagaccaccatcatggtcaccaagtactccgagaagtcccccatcaccatccctttcgagctgtccgctgcttgcctgacttacctgcgtgaaaccttcgagggcaccatcctggacaagatcctgaacgtcgaggctatgcacaccgtgctgcgtgctctgaagaacaccgctgacgctatggaacgtggcctgatccacagcttcctccagaccctgctgaggaaggctcccccctacttcgtggtgcagaccctggtcgagaacgctaccctggctcgtcaggctctgaaccgtatccagcgctccaacatcctgcagtccttcaaggctaagatgctggctaccctgttcctgctgaaccgtacccgtgaccgtgactacgtgctgaagttcctgacccgtctggctgaggctgctaccgactccatcctcgacaaccctactacctacaccacctcctccggtgctaagatctccggtgtcatggtgtccaccgctaacgtgatgcagatcatcatgtccctgctgtcctcccacatcactaaggaaaccgtgtccgctcccgctacctacggcaacttcgtgctgtcccccgagaacgctgtgaccgctatctcctaccactctatcctggctgacttcaactcctacaaggctcacctgacctccggccagccccacctccccaacgactccctgagccaggctggtgctcactccctgacccccctgtccatggacgtgatccgtctgggcgaaaagaccgtgatcatggaaaacctgcgtcgcgtgtacaagaacaccgacaccaaggaccccctggaacgtaacgtggacctgaccttcttcttccccgtgggcctgtacctgcccgaggaccgtggttacaccaccgtcgagtccaaggtcaagctgaacgacaccgtgcgtaacgctctgcccaccaccgcttacctgctgaacagggaccgtgctgtgcaaaagatcgacttcgtggacgctctcaagaccctgtgccaccccgtgctgcacgagcctgctccatgcctgcaggctttcaccgagcgtggtcccccatccgagcccgctatgcagcgtctgctggaatgccgtttccagcaagagcccatgggtggtgctgctcgtcgtatcccccacttctaccgtgtgcgccgcgaggtgccccgtaccgtgaacgagatgaagcaggacttcgtggtcaccgacttctacaaggttggaaacatcaccctgtacaccgagctgcaccctttcttcgacttcacccactgccaagagaactccgagactgtggctctgtgcaccccccgtatcgtgatcggcaacctgcccgacggcctggctcccggtcccttccacgagctgaggacctgggagatcatggaacacatgcgcctgcgtcccccacccgactacgaggaaaccctgcgtctgttcaagaccaccgtgacctcccccaactaccccgagctgtgctacctggtggacgtgctggtgcacggcaacgctgacgctttcctgctgatccgcgctttcatcgctcgttgcatcgtgaacatgttccacacccgtcagctgctggtgttcgctcactcctacgctctggtcaccctgatcgctgagcacctggctgacggtgctctgcccccccagctcctgttccactaccgtaacctggtggctgtgctgcgcctggtcacccgtatctccgctctgcccggcctgaacaacggccagctggctgaggaacccctgtccgcttacgtgaacgctctgcacgaccacaggctgtggccccccttcgtgacccacctccctcgtaacatggaaggtgtccaggtggtggctgatcgtcagcccctgaaccccgctaacatcgaggctcgtcaccacggtgtctccgacgtgccccgtctgggtgctatggacgctgacgagcccctgttcgtggacgactaccgtgctaccgacgacgagtggaccctgcaaaaggtgttctacctgtgcctgatccccgctatgaccaacaaccgtgcttgcggcctgggcctgaacctcaagactctgctggtggacctgttctaccgtcccgccttcctgctcatgcccgctgctaccgctgtgtccacctccggcaccacctccaaggaatccacctctggtgtcacccccgaggactccgtggctgctcagcgtcaggctgtgggcgagatgctgaccgagctggtcgaggacgtggccaccgacgctcacacccctctgctgcaggcttgccgcgagctgttcctggctgtgcagttcgtgggcgagcacgtgaaggtgctggaagtgcgtgctcccctggaccacgctcagaggcagggactgcccgacttcatctcccgtcagcatgtgctgtacaacggttgctgcgtcgtgaccgctcctaagaccctgatcgagtactccctgcccgtgcccttccaccgtttctactccaaccccaccatctgcgctgctctgtccgacgacatcaagcgttacgtgaccgagttcccccactaccatagacacgatggtggtttccccctgcccaccgctttcgctcacgagtaccacaactggctgcgtagccccttctcccgttactccgctacctgccccaacgtgctgcactccgtgatgaccctggctgctatgctgtacaagatctcccccgtgtccctggtgctgcagaccaaggctcacatccaccccggtttcgctctgaccgctgtgcgtaccgacaccttcgaggtggacatgctgctgtactccggcaagtcctgcacctccgtcatcatcaacaaccccatcgtgaccaaggaagagagggacatctccaccacctaccacgtgacccagaacatcaacaccgtggacatgggcctgggttacacctccaacacttgcgtggcctacgtgaaccgcgtccgcaccgacatgggtgtccgtgtgcaggacctgttccgtgtgttccccatgaacgtgtaccgccacgatgaggtggaccgttggatcaggcacgctgctggcgtcgagcgtccccagctgctggacaccgagactatctccatgctgaccttcggttccatgtccgagcgcaacgctgctgctaccgtgcacggccagaaggctgtctgcgagctgatcctgacccctgtgactatggacgtgaactacttcaagatcaccaacaaccctcgtggtcgtgcttcctgcatgctgggcgtggacccctacgacaccgaggctgccaccaaggctatctacgaccaccgcgaggctgacgctcagaccttcgctgctacccacaacccatgggcttcccaggctggttgcctgtccgacgtcctgtacaacacccgtcaccgcgagcgtctgggctacaactccaagttctactccccctgcgctcagtacttcaacaccgaggaaatcatcgctgccaacaagaccctcttcaagaccatcgacgagtacctgctgcgcgctaaggactgcatccgtggcgacaccgacactcagtacgtgtgcgtcgagggaaccgagcagctgatcgagaacccttgccgtctgacccaagaggctctgcccatcctgtccaccaccaccctggctctgatggaaactaagctgaagggtggcgctggtgctttcgctacctccgagactcacttcggcaactacgtcgtgggagagatcatccccctgcagcagtccatgctgttcaacagctaagagctcaagcttgtcgagaagtactagaggatcataatcagccataccacatttgtagaggttttacttgctttaaaaaacctcccacacctccccctgaacctgaaacataaaatgaatgcaattgttgttgttaacttgtttattgcagcttataatggttacaaataaagcaatagcatcacaaatttcacaaataaagcatttttttcactgcattctagttgtggtttgtccaaactcatcaatgtatcttatcatgtctggatctgatcactgcttgagcctagaagatccggctgctaacaaagcccgaaaggaagctgagttggctgctgtggctagctttgtttaactttaagaaggagatacatctagaccggaatattaatagatcatggagataattaaaatgataaccatctcgcaaataaataagtattttactgttttcgtaacagttttgtaataaaaaaacctataaatattccggattattcataccgtcccaccatcgggcgcggatcccggtccgaagcgcgcggaattcaaaggcctacgtcgacgccaccatggaatcccgtggtcgtcgttgccccgagatgatctccgtgctgggtcccatctccggtcacgtcctgaaggctgtgttctcccgtggcgacacccccgtgctgccccacgaaactcgtctgctgcagaccggtatccacgtgcgtgtgtcccagccctccctgatcctggtgtcccagtacacccccgactccaccccttgccaccgcggagacaaccagctgcaggtccagcacacctacttcaccggttccgaggtcgagaacgtgtccgtgaacgtgcacaaccccaccggtcgttccatctgcccctcccaagagcccatgtccatctacgtgtacgctctgcccctgaagatgctgaacatcccctccatcaacgtgcaccactacccctccgctgctgagcgcaagcaccgtcacctccccgtggctgacgctgtgatccacgcttccggcaagcagatgtggcaggctcgtctgaccgtgtccggcctggcttggacccgtcagcagaaccagtggaaggaacccgacgtgtactacacctccgctttcgtgttccccaccaaggacgtggccctgcgtcacgtcgtgtgcgctcacgaactcgtgtgctccatggaaaacacccgtgctaccaagatgcaagtgatcggcgaccagtacgtgaaggtgtacctggaatccttctgcgaggacgtgccctccggcaagctgttcatgcacgtgaccctgggttccgacgtggaagaggacctgaccatgacccgtaacccccagcccttcatgcgtccccacgagcgtaacggtttcaccgtgctgtgccccaagaacatgatcatcaagcccggcaagatctcccacatcatgctggacgtggccttcacctcccacgagcacttcggcctgctgtgccctaagtccatccccggcctgtccatctccggcaacctgctgatgaacggccagcagatcttcctggaagtgcaggctatccgtgaaaccgtcgagctgcgtcagtacgaccctgtggctgctctgttcttcttcgacatcgacctgctgctgcagcgtggtccccagtactccgagcaccccaccttcaccagccagtaccgtatccagggcaagctggaataccgtcacacctgggaccgtcacgacgagggtgctgctcagggcgacgacgacgtgtggacctccggttccgactccgacgaggaactggtcaccaccgagcgcaagaccccccgtgtgaccggtggtggtgctatggctggtgcttccacctccgctggtcgcaagcgcaagtccgcttcctccgctaccgcttgcaccgctggtgtcatgacccgtggtcgcctgaaggctgagtccaccgtggctcccgaagaggacactgacgaggactccgacaacgagatccacaaccccgctgtgttcacctggcccccctggcaggctggtatcctggctcgtaacctggtgcccatggtggctaccgtgcagggccagaacctgaagtaccaagagttcttctgggacgccaacgacatctaccgtatcttcgctgagctggaaggcgtgtggcagcccgctgctcagcccaagcgtcgtcgtcaccgtcaggacgctctgcctggtccctgtatcgcttccacccccaagaagcaccgcggctaaaagcttgtcgagaagtactagaggatcataatcagccataccacatttgtagaggttttacttgctttaaaaaacctcccacacctccccctgaacctgaaacataaaatgaatgcaattgttgttgttaacttgtttattgcagcttataatggttacaaataaagcaatagcatcacaaatttcacaaataaagcatttttttcactgcattctagttgtggtttgtccaaactcatcaatgtatcttatcatgtctggatctgatcactgcttgagcctagaagatccggctgctaacaaagcccgaaaggaagctgagttggctgctgccaccgctgagcaataactatcataaccggaatattaatagatcatggagataattaaaatgataaccatctcgcaaataaataagtattttactgttttcgtaacagttttgtaataaaaaaacctataaatattccggattattcataccgtcccaccatcgggcgcggatcccggtccgaagcgcgcggaattcgccaccatgaccatggacgagcagcagccccaggctgtgacccccgtgtacgtgggcggtttcctggctcgttacgaccagtcccccgacgaggctgagctgctgctgccacgtgacgtggtcgaacactggctgcacgctcagggccagggacagccttccctgtccgtggctctgcccctgaacatcaaccacgacgacaccgctgtcgtgggtcacgtggccgctatgcagtccgtgcgtgacggcctgttctgcctgggttgcgtgacctccccccgtttcctggaaatcgtgcgtcgtgcttccgagaagtccgagctggtgtcccgtggtcccgtgtccccactgcagcccgacaaggtggtcgagttcctgtccggttcctacgctggcctgtccctgtcatcccgtcgttgcgacgacgtcgaggctgctacctccctgagcggctccgagactacccccttcaagcacgtggccctgtgctccgtgggtcgtaggcgtggaaccctggctgtgtacggtcgtgaccccgagtgggtcacccagcgtttccccgacctgaccgctgctgaccgtgacggactgcgtgctcagtggcagcgttgcggttccaccgctgtggacgcttccggcgaccccttccgttccgactcctacggcctgctgggcaactccgtggacgctctgtacatccgcgagcgtctgcccaagctgcgttacgacaagcagctcgtgggtgtcaccgagcgcgagtcctacgtgaaggcttccgtgtcccccgaggctgcttgcgacatcaaggctgcttccgctgagcgttctggcgacagccgctcccaggctgctactcctgctgctggtgctcgtgtgccctccagctccccatccccacctgtcgagcctccctcccccgtgcaacctcctgctctgcctgcttccccctccgtgctgcctgctgagtccagcccctccctgtcaccctctgagcctgctgaggctgcctccatgtcccaccctctgagcgctgctgtgactgctgctaccgctccccctggtgctactgtggctggtgcttcccccgctgtgccttccctggcttggcctcacgacggtgtctacctgcccaaggacgctttcttctccctgctgggcgcttcccgttccgctgctcccgtgatgtaccccggtgctgtggctgctccccccagcgcttcacctgctcctctgcccctgccctcctaccccgcttcctacggtgctcccgtcgtgggttacgaccagctggctgctcgtcacttcgctgactacgtggacccccactaccccggctggggtcgtcgttacgagcccgctccttccctgcacccatcctaccctgtgccccctcctccatcacccgcttactaccgtcgtcgtgactcccccggtggcatggacgagcctccatctggatgggagcgttacgacggttcccaccgtggccagtcccaaaagcagcaccgtcacggtggttccggtggtcacaacaagcgtcgcaaggaagccgctgctgcatcctccagctccgacgaggacctgagcttccccggcgaggctgaacacggtcgtgctcgcaagcgtctgaagtcccacgtgaactccgacggaggtagcggaggccacgctggttccaaccagcagcagcaacagcgctacgacgagctgcgtgacgctatccacgagctgaagcgtgacctgttcgctgctcgccagtcctccaccctgctgtctgctgctctgccagctgccgcttcttcctcccctaccaccaccaccgtgtgcacccctactggcgagctgacctctggtggtggcgagactcccaccgctctgctgtccggtggtgctaaggtggccgagcgtgctcaggctggtgtcgtgaacgcttcctgccgtctggctaccgcttccggttccgaggctgccaccgctggtccctctaccgctggttcctcatcctgcccagcttccgtggtgctggctgccgctgctgctcaagccgccgctgcttcacagtcccccccaaaggatatggtggacctgaaccgtcgtatcttcgtggctgctctgaacaagctcgagtaataaaagcttgtcgagaagtactagaggatcataatcagccataccacatttgtagaggttttacttgctttaaaaaacctcccacacctccccctgaacctgaaacataaaatgaatgcaattgttgttgttaacttgtttattgcagcttataatggttacaaataaagcaatagcatcacaaatttcacaaataaagcatttttttcactgcattctagttgtggtttgtccaaactcatcaatgtatcttatcatgtctggatctgatcactgcttgagcctagaagatccggctgctaacaaagcccgaaaggaagctgggaatattaatagatcatggagataattaaaatgataaccatctcgcaaataaataagtattttactgttttcgtaacagttttgtaataaaaaaacctataaatattccggattattcataccgtcccaccatcgggcgcggatccgccaccatggctgctatggaagctaacatcttctgcaccttcgaccacaagctgtctatcgctgacgtgggcaagctgaccaagctggtggctgctgtggtgcccatcccccagcgtctgcacctgatcaagcactaccagctgggcctgcaccagttcgtggaccacacccgtggttacgtgcgtctgcgtggcctgctgcgtaacatgaccctgaccctgatgcgtcgtgtcgagggcaaccagatcctgctgcacgtgcccacccacggcctgctgtacaccgtgctgaacaccggtcccgtgacctgggagaagggcgacgctctgtgcgtgctgccccccctgttccacggtcccctggctcgtgaaaacctgttgaccctgggccagtgggagctggtgctgccctggatcgtgcccatgcccctggctctggaaatcaaccagcgcctgctgatcatgggcctgttctccctggaccgttcctacgaagaagtgaaggctgctgtccagcagctgcagaccatcaccttccgtgacgctaccttcaccatccccgaccccgtgatcgaccagcacctcctgatcgacatgaagaccgcttgcctgtccatgtccatggtggctaacctggcttccgagctgaccatgacctacgtccgcaagctggctttggaggactcttccatgctgctggtcaagtgccaagagctgctgatgcgtctggaccgcgagcgttccgtgggcgagcctcgtactcccgctcgtcctcagcacgtgtcccccgacgacgagatcgctcgtctgtccgctctgttcgtgatgctgcgtcagctggacgacctgatccgcgagcaggtcgtgttcaccgtgtgcgacgtgagcccagacaacaagtccgctacctgcatcttcaagggctaaggcgcgccaagcttgtcgagaagtactagaggatcataatcagccataccacatttgtagaggttttacttgctttaaaaaacctcccacacctccccctgaacctgaaacataaaatgaatgcaattgttgttgttaacttgtttattgcagcttataatggttacaaataaagcaatagcatcacaaatttcacaaataaagcatttttttcactgcattctagttgtggtttgtccaaactcatcaatgtatcttatcatgtctggatctgatcactgcttgagcctagaagatccggctgctaacaaagcccgaaaggaagctgagttggctgctgctgagtagtgcgcgagcaaaatttaagctacaacaaggcacgcgtccggaatattaatagatcatggagataattaaaatgataaccatctcgcaaataaataagtattttactgttttcgtaacagttttgtaataaaaaaacctataaatattccggattattcataccgtcccaccatcgggcgcggatcccggtccgaagcgcgcggaattcaaaggcctacgccaccatggagtggaacacactagtactaggtcttttggttttatcggtagcggcaagttccaaccatacgtcgactgctagcacaccgagtccctctagctctactcacacctcaacgaccgtgaaggcaacgactactgcgacaactagtacaactacggtgacaagtacgacttcatcaacgactagtaccaaacccggttccaccactcacgaccccaatgtgatgagaccacatgctcacaatgatttttacaaggcgcattgtacatcgcatatgtatgaactttctctgtccagctttgcggcctggtggactatgcttaatgctctcattctcatgggagctttttgtatcgtactacgacattgctgtttccagaactttactgcaaccaccaccaaaggctattgataaaagcttgtcgagaagtactagaggatcataatcagccataccacatttgtagaggttttacttgctttaaaaaacctcccacacctccccctgaacctgaaacataaaatgaatgcaattgttgttgttaacttgtttattgcagcttataatggttacaaataaagcaatagcatcacaaatttcacaaataaagcatttttttcactgcattctagttgtggtttgtccaaactcatcaatgtatcttatcatgtctggatctgatcactgcttgagcctagaagatccggctgctaacaaagcccgaaaggaagctgagttggctgctgccaccgctgagcaataactatcataacccctaggagatccgaaccagataagtgaaatctagttccaaactattttgtcatttttaattttcgtattagcttacgacgctacacccagttcccatctattttgtcactcttccctaaataatccttaaaaactccatttccacccctcccagttcccaactattttgtccgcccaca

SEQ ID NO: 76 - DNA, 16719 bp, Artificial Sequence
  Synthetic construct
ttgttccagtttggaacaagagtccactattaaagaacgtggactccaacgtcaaagggcgaaaaaccgtctatcagggcgatggcccactacgtgaaccatcaccctaatcaagttttttggggtcgaggtgccgtaaagcactaaatcggaaccctaaagggagcccccgatttagagcttgacggggaaagccggcgaacgtggcgagaaaggaagggaagaaagcgaaaggagcgggcgctagggcgctggcaagtgtagcggtcacgctgcgcgtaaccaccacacccgccgcgcttaatgcgccgctacagggcgcgtcgcgccattcgccattcaggctgcgcaactgttgggaagggcgatcggtgcgggcctcttcgctattacgccagctggcgaaagggggatgtgctgcaaggcgattaagttgggtaacgccagggttttcccagtcacgacgttgtaaaacgacggccagtgcatagaccagccgcgtaacctggcaaaatcggttacggttgagtaataaatggatgccctgcgtaagcgggtgtgggcggacaataaagtcttaaactgaacaaaatagatctaaactatgacaataaagtcttaaactagacagaatagttgtaaactgaaatcagtccagttatgctgtgaaaaagcatactggacttttgttatggctaaagcaaactcttcattttctgaagtgcaaattgcccgtcgtattaaagaggggcgtggccaagggcatggtaaagactatattcgcggcgttgtgacaatttaccgaacaactccgcggccgggaagccgatctcggcttgaacgaattgttaggtggcggtacttgggtcgatatcaaagtgcatcacttcttcccgtatgcccaactttgtatagagagccactgcgggatcgtcaccgtaatctgcttgcacgtagatcacataagcaccaagcgcgttggcctcatgcttgaggagattgatgagcgcggtggcaatgccctgcctccggtgctcgccggagactgcgagatcatagatatagatctcactacgcggctgctcaaacttgggcagaacgtaagccgcgagagcgccaacaaccgcttcttggtcgaaggcagcaagcgcgatgaatgtcttactacggagcaagttcccgaggtaatcggagtccggctgatgttgggagtaggtggctacgtctccgaactcacgaccgaaaagatcaagagcagcccgcatggatttgacttggtcagggccgagcctacatgtgcgaatgatgcccatacttgagccacctaactttgttttagggcgactgccctgctgcgtaacatcgttgctgctgcgtaacatcgttgctgctccataacatcaaacatcgacccacggcgtaacgcgcttgctgcttggatgcccgaggcatagactgtacaaaaaaacagtcataacaagccatgaaaaccgccactgcgccgttaccaccgctgcgttcggtcaaggttctggaccagttgcgtgagcgcatacgctacttgcattacagtttacgaaccgaacaggcttatgtcaactgggttcgtgccttcatccgtttccacggtgtgcgtcacccggcaaccttgggcagcagcgaagtcgaggcatttctgtcctggctggcgaacgagcgcaaggtttcggtctccacgcatcgtcaggcattggcggccttgctgttcttctacggcaaggtgctgtgcacggatctgcccttgcttcaggagatcggtagacctcggccgtcgcggcgcttgccggtggtgctgaccccggatgaagtggttcgcatcctcggttttctggaaggcgagcatcgtttgttcgcccaggactctagctatagttctagtggttggctacagctttgtttgtactatcaacaggttgaactgctgatcaacagatcctctacgcggccgcggtaccataacttcgtatagcatacattatacgaagttatctggtttaaacgtacccgtagtggctatggcagggcttgccgccccgacgttggctgcgagccctgggccttcacccgaacttgggggttggggtggggaaaaggaagaaacgcgggcgtattggtcccaatggggtctcggtggggtatcgacagagtgccagccctgggaccgaaccccgcgtttatgaacaaacgacccaacacccgtgcgttttattctgtctttttattgccgtcatagcgcgggttccttccggtattgtctccttccgtgtttcagttagcctcccccatctcccggtaccgcatgctatgcatcagctgctagcttactgcagccaccaccacagggagttcagggtggacaggttcacagcacgacggtgctcagggggggtcaggttgccgtaggtggaggactgcaggctgaagttacggatctcagacaggaacagcagggagtccaggtagtcccacatggggtcgatgaaggtgcgctggaaacgggtggatggggaggtgggggtggtcttgttgttgtcggaagcagtctcgttctcgacgggcatggtgtcgttgtagtacagggaggacatgtccagggtgccgtagatggtgtagggagtctcgttacggatcagcacgtgagtgttcttcatgaactcggacacagcggtacggttacggttgggcttgcagaagggctcgtcacggtaacgcagggtggtgtacacccaggtagccaggtccttcagctgagtggtcaggatagacttcatgaagttctcgtcgggacggtaaccgatggtagaggtggggatacgggtgggcacgatgggggagtaggtcacgttggtggaaacgttgaagatggtggaggtgtaggaggagtagggggtagtagtgctgacgcgggacttcttggagatggacttcacgggagcctgcttgcgcttcagcttgcgcatggtgttcttcagcttggtggagttgatgtacttgggcacacggaagatgttacgggacatagcgttgaccaggtagaaggaacgggtgcagttgcgctgagcgtaacgcagcagcagagcagccaggcccaggaagtagatagtctgggagtccacgttgaccttggaggggcccacgtacagcttggtgttccaacggggcacgttgaagaacatggggttgaaggtggtgaagttgccgcagttttcctcgccggtgttgttacgacgggacacgttcagcatctcggacaggcaggtcatggaggggatggtgccgcaagaggggggacggaaggtgatcttctggccggtgtggttgtactcggagtacacgtacttagcgggcttgcgcagctgggtggtgtggaagtcgaaccacaggtgggtgatggagtggttacggatgggaccagccaggatggagttgggggggaactgcttcatctcgacggtgatgttgtacagcttctgctggctggggaaggtgaagaacttgtagtagtcgccggtcttggaagccagctcttgcaggatacgcagcttcagctggcgttcctcttccttagccttctgggacttcacacggaaacgagccacagcgatcttgcagttgatgaagctgaacagcaggaaggtcagggacatcaggaagaacaggttgaacacgccacgcatctcgcccttgcgacccatggtggcctcgagatcccgggtgatcaagtcttcgtcgagtgattgtaaataaaatgtaatttacagtatagtattttaattaatatacaaatgatttgataataattcttatttaactataatatattgtgttgggttgaattaaaggtccgtatactagtatcgattcgcgacctactccggaatattaatagatcatggagataattaaaatgataaccatctcgcaaataaataagtattttactgttttcgtaacagttttgtaataaaaaaacctataaatattccggattattcataccgtcccaccatcgggcgcggatccgccaccatggaaaactggtccgctctggaactgctgcccaaggtcggaatccctaccgacttcctgacccacgtcaagacctccgctggcgaggaaatgttcgaggctctgaggatctactacggcgacgaccccgagcgttacaacatccacttcgaggctatcttcggcaccttctgcaaccgtctggaatgggtgtacttcctgacttccggcctggctgctgctgctcacgctatcaagttccacgacctgaacaagctgaccaccggcaagatgctgttccacgtgcaagtgccccgtgtggcttccggtgctggcctgcctacctcccgtcagaccaccatcatggtcaccaagtactccgagaagtcccccatcaccatccctttcgagctgtccgctgcttgcctgacttacctgcgtgaaaccttcgagggcaccatcctggacaagatcctgaacgtcgaggctatgcacaccgtgctgcgtgctctgaagaacaccgctgacgctatggaacgtggcctgatccacagcttcctccagaccctgctgaggaaggctcccccctacttcgtggtgcagaccctggtcgagaacgctaccctggctcgtcaggctctgaaccgtatccagcgctccaacatcctgcagtccttcaaggctaagatgctggctaccctgttcctgctgaaccgtacccgtgaccgtgactacgtgctgaagttcctgacccgtctggctgaggctgctaccgactccatcctcgacaaccctactacctacaccacctcctccggtgctaagatctccggtgtcatggtgtccaccgctaacgtgatgcagatcatcatgtccctgctgtcctcccacatcactaaggaaaccgtgtccgctcccgctacctacggcaacttcgtgctgtcccccgagaacgctgtgaccgctatctcctaccactctatcctggctgacttcaactcctacaaggctcacctgacctccggccagccccacctccccaacgactccctgagccaggctggtgctcactccctgacccccctgtccatggacgtgatccgtctgggcgaaaagaccgtgatcatggaaaacctgcgtcgcgtgtacaagaacaccgacaccaaggaccccctggaacgtaacgtggacctgaccttcttcttccccgtgggcctgtacctgcccgaggaccgtggttacaccaccgtcgagtccaaggtcaagctgaacgacaccgtgcgtaacgctctgcccaccaccgcttacctgctgaacagggaccgtgctgtgcaaaagatcgacttcgtggacgctctcaagaccctgtgccaccccgtgctgcacgagcctgctccatgcctgcaggctttcaccgagcgtggtcccccatccgagcccgctatgcagcgtctgctggaatgccgtttccagcaagagcccatgggtggtgctgctcgtcgtatcccccacttctaccgtgtgcgccgcgaggtgccccgtaccgtgaacgagatgaagcaggacttcgtggtcaccgacttctacaaggttggaaacatcaccctgtacaccgagctgcaccctttcttcgacttcacccactgccaagagaactccgagactgtggctctgtgcaccccccgtatcgtgatcggcaacctgcccgacggcctggctcccggtcccttccacgagctgaggacctgggagatcatggaacacatgcgcctgcgtcccccacccgactacgaggaaaccctgcgtctgttcaagaccaccgtgacctcccccaactaccccgagctgtgctacctggtggacgtgctggtgcacggcaacgctgacgctttcctgctgatccgcgctttcatcgctcgttgcatcgtgaacatgttccacacccgtcagctgctggtgttcgctcactcctacgctctggtcaccctgatcgctgagcacctggctgacggtgctctgcccccccagctcctgttccactaccgtaacctggtggctgtgctgcgcctggtcacccgtatctccgctctgcccggcctgaacaacggccagctggctgaggaacccctgtccgcttacgtgaacgctctgcacgaccacaggctgtggccccccttcgtgacccacctccctcgtaacatggaaggtgtccaggtggtggctgatcgtcagcccctgaaccccgctaacatcgaggctcgtcaccacggtgtctccgacgtgccccgtctgggtgctatggacgctgacgagcccctgttcgtggacgactaccgtgctaccgacgacgagtggaccctgcaaaaggtgttctacctgtgcctgatccccgctatgaccaacaaccgtgcttgcggcctgggcctgaacctcaagactctgctggtggacctgttctaccgtcccgccttcctgctcatgcccgctgctaccgctgtgtccacctccggcaccacctccaaggaatccacctctggtgtcacccccgaggactccgtggctgctcagcgtcaggctgtgggcgagatgctgaccgagctggtcgaggacgtggccaccgacgctcacacccctctgctgcaggcttgccgcgagctgttcctggctgtgcagttcgtgggcgagcacgtgaaggtgctggaagtgcgtgctcccctggaccacgctcagaggcagggactgcccgacttcatctcccgtcagcatgtgctgtacaacggttgctgcgtcgtgaccgctcctaagaccctgatcgagtactccctgcccgtgcccttccaccgtttctactccaaccccaccatctgcgctgctctgtccgacgacatcaagcgttacgtgaccgagttcccccactaccatagacacgatggtggtttccccctgcccaccgctttcgctcacgagtaccacaactggctgcgtagccccttctcccgttactccgctacctgccccaacgtgctgcactccgtgatgaccctggctgctatgctgtacaagatctcccccgtgtccctggtgctgcagaccaaggctcacatccaccccggtttcgctctgaccgctgtgcgtaccgacaccttcgaggtggacatgctgctgtactccggcaagtcctgcacctccgtcatcatcaacaaccccatcgtgaccaaggaagagagggacatctccaccacctaccacgtgacccagaacatcaacaccgtggacatgggcctgggttacacctccaacacttgcgtggcctacgtgaaccgcgtccgcaccgacatgggtgtccgtgtgcaggacctgttccgtgtgttccccatgaacgtgtaccgccacgatgaggtggaccgttggatcaggcacgctgctggcgtcgagcgtccccagctgctggacaccgagactatctccatgctgaccttcggttccatgtccgagcgcaacgctgctgctaccgtgcacggccagaaggctgtctgcgagctgatcctgacccctgtgactatggacgtgaactacttcaagatcaccaacaaccctcgtggtcgtgcttcctgcatgctgggcgtggacccctacgacaccgaggctgccaccaaggctatctacgaccaccgcgaggctgacgctcagaccttcgctgctacccacaacccatgggcttcccaggctggttgcctgtccgacgtcctgtacaacacccgtcaccgcgagcgtctgggctacaactccaagttctactccccctgcgctcagtacttcaacaccgaggaaatcatcgctgccaacaagaccctcttcaagaccatcgacgagtacctgctgcgcgctaaggactgcatccgtggcgacaccgacactcagtacgtgtgcgtcgagggaaccgagcagctgatcgagaacccttgccgtctgacccaagaggctctgcccatcctgtccaccaccaccctggctctgatggaaactaagctgaagggtggcgctggtgctttcgctacctccgagactcacttcggcaactacgtcgtgggagagatcatccccctgcagcagtccatgctgttcaacagctaagagctcaagcttgtcgagaagtactagaggatcataatcagccataccacatttgtagaggttttacttgctttaaaaaacctcccacacctccccctgaacctgaaacataaaatgaatgcaattgttgttgttaacttgtttattgcagcttataatggttacaaataaagcaatagcatcacaaatttcacaaataaagcatttttttcactgcattctagttgtggtttgtccaaactcatcaatgtatcttatcatgtctggatctgatcactgcttgagcctagaagatccggctgctaacaaagcccgaaaggaagctgagttggctgctgtggctagctttgtttaactttaagaaggagatacatctagaccggaatattaatagatcatggagataattaaaatgataaccatctcgcaaataaataagtattttactgttttcgtaacagttttgtaataaaaaaacctataaatattccggattattcataccgtcccaccatcgggcgcggatcccggtccgaagcgcgcggaattcaaaggcctacgtcgacgccaccatggaatcccgtggtcgtcgttgccccgagatgatctccgtgctgggtcccatctccggtcacgtcctgaaggctgtgttctcccgtggcgacacccccgtgctgccccacgaaactcgtctgctgcagaccggtatccacgtgcgtgtgtcccagccctccctgatcctggtgtcccagtacacccccgactccaccccttgccaccgcggagacaaccagctgcaggtccagcacacctacttcaccggttccgaggtcgagaacgtgtccgtgaacgtgcacaaccccaccggtcgttccatctgcccctcccaagagcccatgtccatctacgtgtacgctctgcccctgaagatgctgaacatcccctccatcaacgtgcaccactacccctccgctgctgagcgcaagcaccgtcacctccccgtggctgacgctgtgatccacgcttccggcaagcagatgtggcaggctcgtctgaccgtgtccggcctggcttggacccgtcagcagaaccagtggaaggaacccgacgtgtactacacctccgctttcgtgttccccaccaaggacgtggccctgcgtcacgtcgtgtgcgctcacgaactcgtgtgctccatggaaaacacccgtgctaccaagatgcaagtgatcggcgaccagtacgtgaaggtgtacctggaatccttctgcgaggacgtgccctccggcaagctgttcatgcacgtgaccctgggttccgacgtggaagaggacctgaccatgacccgtaacccccagcccttcatgcgtccccacgagcgtaacggtttcaccgtgctgtgccccaagaacatgatcatcaagcccggcaagatctcccacatcatgctggacgtggccttcacctcccacgagcacttcggcctgctgtgccctaagtccatccccggcctgtccatctccggcaacctgctgatgaacggccagcagatcttcctggaagtgcaggctatccgtgaaaccgtcgagctgcgtcagtacgaccctgtggctgctctgttcttcttcgacatcgacctgctgctgcagcgtggtccccagtactccgagcaccccaccttcaccagccagtaccgtatccagggcaagctggaataccgtcacacctgggaccgtcacgacgagggtgctgctcagggcgacgacgacgtgtggacctccggttccgactccgacgaggaactggtcaccaccgagcgcaagaccccccgtgtgaccggtggtggtgctatggctggtgcttccacctccgctggtcgcaagcgcaagtccgcttcctccgctaccgcttgcaccgctggtgtcatgacccgtggtcgcctgaaggctgagtccaccgtggctcccgaagaggacactgacgaggactccgacaacgagatccacaaccccgctgtgttcacctggcccccctggcaggctggtatcctggctcgtaacctggtgcccatggtggctaccgtgcagggccagaacctgaagtaccaagagttcttctgggacgccaacgacatctaccgtatcttcgctgagctggaaggcgtgtggcagcccgctgctcagcccaagcgtcgtcgtcaccgtcaggacgctctgcctggtccctgtatcgcttccacccccaagaagcaccgcggctaaaagcttgtcgagaagtactagaggatcataatcagccataccacatttgtagaggttttacttgctttaaaaaacctcccacacctccccctgaacctgaaacataaaatgaatgcaattgttgttgttaacttgtttattgcagcttataatggttacaaataaagcaatagcatcacaaatttcacaaataaagcatttttttcactgcattctagttgtggtttgtccaaactcatcaatgtatcttatcatgtctggatctgatcactgcttgagcctagaagatccggctgctaacaaagcccgaaaggaagctgagttggctgctgccaccgctgagcaataactatcataaccggaatattaatagatcatggagataattaaaatgataaccatctcgcaaataaataagtattttactgttttcgtaacagttttgtaataaaaaaacctataaatattccggattattcataccgtcccaccatcgggcgcggatcccggtccgaagcgcgcggaattcgccaccatgaccatggacgagcagcagccccaggctgtgacccccgtgtacgtgggcggtttcctggctcgttacgaccagtcccccgacgaggctgagctgctgctgccacgtgacgtggtcgaacactggctgcacgctcagggccagggacagccttccctgtccgtggctctgcccctgaacatcaaccacgacgacaccgctgtcgtgggtcacgtggccgctatgcagtccgtgcgtgacggcctgttctgcctgggttgcgtgacctccccccgtttcctggaaatcgtgcgtcgtgcttccgagaagtccgagctggtgtcccgtggtcccgtgtccccactgcagcccgacaaggtggtcgagttcctgtccggttcctacgctggcctgtccctgtcatcccgtcgttgcgacgacgtcgaggctgctacctccctgagcggctccgagactacccccttcaagcacgtggccctgtgctccgtgggtcgtaggcgtggaaccctggctgtgtacggtcgtgaccccgagtgggtcacccagcgtttccccgacctgaccgctgctgaccgtgacggactgcgtgctcagtggcagcgttgcggttccaccgctgtggacgcttccggcgaccccttccgttccgactcctacggcctgctgggcaactccgtggacgctctgtacatccgcgagcgtctgcccaagctgcgttacgacaagcagctcgtgggtgtcaccgagcgcgagtcctacgtgaaggcttccgtgtcccccgaggctgcttgcgacatcaaggctgcttccgctgagcgttctggcgacagccgctcccaggctgctactcctgctgctggtgctcgtgtgccctccagctccccatccccacctgtcgagcctccctcccccgtgcaacctcctgctctgcctgcttccccctccgtgctgcctgctgagtccagcccctccctgtcaccctctgagcctgctgaggctgcctccatgtcccaccctctgagcgctgctgtgactgctgctaccgctccccctggtgctactgtggctggtgcttcccccgctgtgccttccctggcttggcctcacgacggtgtctacctgcccaaggacgctttcttctccctgctgggcgcttcccgttccgctgctcccgtgatgtaccccggtgctgtggctgctccccccagcgcttcacctgctcctctgcccctgccctcctaccccgcttcctacggtgctcccgtcgtgggttacgaccagctggctgctcgtcacttcgctgactacgtggacccccactaccccggctggggtcgtcgttacgagcccgctccttccctgcacccatcctaccctgtgccccctcctccatcacccgcttactaccgtcgtcgtgactcccccggtggcatggacgagcctccatctggatgggagcgttacgacggttcccaccgtggccagtcccaaaagcagcaccgtcacggtggttccggtggtcacaacaagcgtcgcaaggaagccgctgctgcatcctccagctccgacgaggacctgagcttccccggcgaggctgaacacggtcgtgctcgcaagcgtctgaagtcccacgtgaactccgacggaggtagcggaggccacgctggttccaaccagcagcagcaacagcgctacgacgagctgcgtgacgctatccacgagctgaagcgtgacctgttcgctgctcgccagtcctccaccctgctgtctgctgctctgccagctgccgcttcttcctcccctaccaccaccaccgtgtgcacccctactggcgagctgacctctggtggtggcgagactcccaccgctctgctgtccggtggtgctaaggtggccgagcgtgctcaggctggtgtcgtgaacgcttcctgccgtctggctaccgcttccggttccgaggctgccaccgctggtccctctaccgctggttcctcatcctgcccagcttccgtggtgctggctgccgctgctgctcaagccgccgctgcttcacagtcccccccaaaggatatggtggacctgaaccgtcgtatcttcgtggctgctctgaacaagctcgagtaataaaagcttgtcgagaagtactagaggatcataatcagccataccacatttgtagaggttttacttgctttaaaaaacctcccacacctccccctgaacctgaaacataaaatgaatgcaattgttgttgttaacttgtttattgcagcttataatggttacaaataaagcaatagcatcacaaatttcacaaataaagcatttttttcactgcattctagttgtggtttgtccaaactcatcaatgtatcttatcatgtctggatctgatcactgcttgagcctagaagatccggctgctaacaaagcccgaaaggaagctgggaatattaatagatcatggagataattaaaatgataaccatctcgcaaataaataagtattttactgttttcgtaacagttttgtaataaaaaaacctataaatattccggattattcataccgtcccaccatcgggcgcggatccgccaccatggctgctatggaagctaacatcttctgcaccttcgaccacaagctgtctatcgctgacgtgggcaagctgaccaagctggtggctgctgtggtgcccatcccccagcgtctgcacctgatcaagcactaccagctgggcctgcaccagttcgtggaccacacccgtggttacgtgcgtctgcgtggcctgctgcgtaacatgaccctgaccctgatgcgtcgtgtcgagggcaaccagatcctgctgcacgtgcccacccacggcctgctgtacaccgtgctgaacaccggtcccgtgacctgggagaagggcgacgctctgtgcgtgctgccccccctgttccacggtcccctggctcgtgaaaacctgttgaccctgggccagtgggagctggtgctgccctggatcgtgcccatgcccctggctctggaaatcaaccagcgcctgctgatcatgggcctgttctccctggaccgttcctacgaagaagtgaaggctgctgtccagcagctgcagaccatcaccttccgtgacgctaccttcaccatccccgaccccgtgatcgaccagcacctcctgatcgacatgaagaccgcttgcctgtccatgtccatggtggctaacctggcttccgagctgaccatgacctacgtccgcaagctggctttggaggactcttccatgctgctggtcaagtgccaagagctgctgatgcgtctggaccgcgagcgttccgtgggcgagcctcgtactcccgctcgtcctcagcacgtgtcccccgacgacgagatcgctcgtctgtccgctctgttcgtgatgctgcgtcagctggacgacctgatccgcgagcaggtcgtgttcaccgtgtgcgacgtgagcccagacaacaagtccgctacctgcatcttcaagggctaaggcgcgccaagcttgtcgagaagtactagaggatcataatcagccataccacatttgtagaggttttacttgctttaaaaaacctcccacacctccccctgaacctgaaacataaaatgaatgcaattgttgttgttaacttgtttattgcagcttataatggttacaaataaagcaatagcatcacaaatttcacaaataaagcatttttttcactgcattctagttgtggtttgtccaaactcatcaatgtatcttatcatgtctggatctgatcactgcttgagcctagaagatccggctgctaacaaagcccgaaaggaagctgagttggctgctgctgagtagtgcgcgagcaaaatttaagctacaacaaggcacgcgtccggaatattaatagatcatggagataattaaaatgataaccatctcgcaaataaataagtattttactgttttcgtaacagttttgtaataaaaaaacctataaatattccggattattcataccgtcccaccatcgggcgcggatcccggtccgaagcgcgcggaattcaaaggcctacatggccccctcccacgtggacaaggtgaacacccgcacctggtccgcctccatcgtgttcatggtgctgaccttcgtgaacgtgtccgtgcacctggtgctgtccaacttcccccacctgggctacccctgcgtgtactaccacgtggtggacttcgagcgcctgaacatgtccgcctacaacgtgatgcacctgcacacccccatgctgttcctggactccgtgcagctggtgtgctacgccgtgttcatgcagctggtgttcctggccgtgaccatctactacctggtgtgctggatcaagatctccatgcgcaaggacaagggcatgtccctgaaccagtccacccgcgacatctcctacatgggcgactccctgaccgccttcctgttcatcctgtccatggacaccttccagctgttcaccctgaccatgtccttccgcctgccctccatgatcgccttcatggccgccgtgcacttcttctgcctgaccatcttcaacgtgtccatggtgacccagtaccgctcctacaagcgctccctgttcttcttctcccgcctgcaccccaagctgaagggcaccgtgcagttccgcaccctgatcgtgaacctggtggaggtggccctgggcttcaacaccaccgtggtggccatggccctgtgctacggcttcggcaacaacttcttcgtgcgcaccggccacatggtgctggccgtgttcgtggtgtacgccatcatctccatcatctacttcctgctgatcgaggccgtgttcttccagtacgtgaaggtgcagttcggctaccacctgggcgccttcttcggcctgtgcggcctgatctaccccatcgtgcagtacgacaccttcctgtccaacgagtaccgcaccggcatctcctggtccttcggcatgctgttcttcatctgggccatgttcaccacctgccgcgccgtgcgctacttccgcggccgcggctccggctccgtgaagtaccaggccctggccaccgcctccggcgaggaggtggccgccctgtcccaccacgactccctggagtcccgccgcctgcgcgaggaggaggacgacgacgacgacgaggacttcgaggacgcctaaaagcttgtcgagaagtactagaggatcataatcagccataccacatttgtagaggttttacttgctttaaaaaacctcccacacctccccctgaacctgaaacataaaatgaatgcaattgttgttgttaacttgtttattgcagcttataatggttacaaataaagcaatagcatcacaaatttcacaaataaagcatttttttcactgcattctagttgtggtttgtccaaactcatcaatgtatcttatcatgtctggatctgatcactgcttgagcctagaagatccggctgctaacaaagcccgaaaggaagctgagttggctgctgccaccgctgagcaataactatcataacccctaggagatccgaaccagataagtgaaatctagttccaaactattttgtcatttttaattttcgtattagcttacgacgctacacccagttcccatctattttgtcactcttccctaaataatccttaaaaactccatttccacccctcccagttcccaactattttgtccgcccaca

SEQ ID NO: 77 - DNA, 17186 bp, Artificial Sequence
  Synthetic construct
ttgttccagtttggaacaagagtccactattaaagaacgtggactccaacgtcaaagggcgaaaaaccgtctatcagggcgatggcccactacgtgaaccatcaccctaatcaagttttttggggtcgaggtgccgtaaagcactaaatcggaaccctaaagggagcccccgatttagagcttgacggggaaagccggcgaacgtggcgagaaaggaagggaagaaagcgaaaggagcgggcgctagggcgctggcaagtgtagcggtcacgctgcgcgtaaccaccacacccgccgcgcttaatgcgccgctacagggcgcgtcgcgccattcgccattcaggctgcgcaactgttgggaagggcgatcggtgcgggcctcttcgctattacgccagctggcgaaagggggatgtgctgcaaggcgattaagttgggtaacgccagggttttcccagtcacgacgttgtaaaacgacggccagtgcatagaccagccgcgtaacctggcaaaatcggttacggttgagtaataaatggatgccctgcgtaagcgggtgtgggcggacaataaagtcttaaactgaacaaaatagatctaaactatgacaataaagtcttaaactagacagaatagttgtaaactgaaatcagtccagttatgctgtgaaaaagcatactggacttttgttatggctaaagcaaactcttcattttctgaagtgcaaattgcccgtcgtattaaagaggggcgtggccaagggcatggtaaagactatattcgcggcgttgtgacaatttaccgaacaactccgcggccgggaagccgatctcggcttgaacgaattgttaggtggcggtacttgggtcgatatcaaagtgcatcacttcttcccgtatgcccaactttgtatagagagccactgcgggatcgtcaccgtaatctgcttgcacgtagatcacataagcaccaagcgcgttggcctcatgcttgaggagattgatgagcgcggtggcaatgccctgcctccggtgctcgccggagactgcgagatcatagatatagatctcactacgcggctgctcaaacttgggcagaacgtaagccgcgagagcgccaacaaccgcttcttggtcgaaggcagcaagcgcgatgaatgtcttactacggagcaagttcccgaggtaatcggagtccggctgatgttgggagtaggtggctacgtctccgaactcacgaccgaaaagatcaagagcagcccgcatggatttgacttggtcagggccgagcctacatgtgcgaatgatgcccatacttgagccacctaactttgttttagggcgactgccctgctgcgtaacatcgttgctgctgcgtaacatcgttgctgctccataacatcaaacatcgacccacggcgtaacgcgcttgctgcttggatgcccgaggcatagactgtacaaaaaaacagtcataacaagccatgaaaaccgccactgcgccgttaccaccgctgcgttcggtcaaggttctggaccagttgcgtgagcgcatacgctacttgcattacagtttacgaaccgaacaggcttatgtcaactgggttcgtgccttcatccgtttccacggtgtgcgtcacccggcaaccttgggcagcagcgaagtcgaggcatttctgtcctggctggcgaacgagcgcaaggtttcggtctccacgcatcgtcaggcattggcggccttgctgttcttctacggcaaggtgctgtgcacggatctgcccttgcttcaggagatcggtagacctcggccgtcgcggcgcttgccggtggtgctgaccccggatgaagtggttcgcatcctcggttttctggaaggcgagcatcgtttgttcgcccaggactctagctatagttctagtggttggctacagctttgtttgtactatcaacaggttgaactgctgatcaacagatcctctacgcggccgcggtaccataacttcgtatagcatacattatacgaagttatctggtttaaacgtacccgtagtggctatggcagggcttgccgccccgacgttggctgcgagccctgggccttcacccgaacttgggggttggggtggggaaaaggaagaaacgcgggcgtattggtcccaatggggtctcggtggggtatcgacagagtgccagccctgggaccgaaccccgcgtttatgaacaaacgacccaacacccgtgcgttttattctgtctttttattgccgtcatagcgcgggttccttccggtattgtctccttccgtgtttcagttagcctcccccatctcccggtaccgcatgctatgcatcagctgctagcttactgcagccaccaccacagggagttcagggtggacaggttcacagcacgacggtgctcagggggggtcaggttgccgtaggtggaggactgcaggctgaagttacggatctcagacaggaacagcagggagtccaggtagtcccacatggggtcgatgaaggtgcgctggaaacgggtggatggggaggtgggggtggtcttgttgttgtcggaagcagtctcgttctcgacgggcatggtgtcgttgtagtacagggaggacatgtccagggtgccgtagatggtgtagggagtctcgttacggatcagcacgtgagtgttcttcatgaactcggacacagcggtacggttacggttgggcttgcagaagggctcgtcacggtaacgcagggtggtgtacacccaggtagccaggtccttcagctgagtggtcaggatagacttcatgaagttctcgtcgggacggtaaccgatggtagaggtggggatacgggtgggcacgatgggggagtaggtcacgttggtggaaacgttgaagatggtggaggtgtaggaggagtagggggtagtagtgctgacgcgggacttcttggagatggacttcacgggagcctgcttgcgcttcagcttgcgcatggtgttcttcagcttggtggagttgatgtacttgggcacacggaagatgttacgggacatagcgttgaccaggtagaaggaacgggtgcagttgcgctgagcgtaacgcagcagcagagcagccaggcccaggaagtagatagtctgggagtccacgttgaccttggaggggcccacgtacagcttggtgttccaacggggcacgttgaagaacatggggttgaaggtggtgaagttgccgcagttttcctcgccggtgttgttacgacgggacacgttcagcatctcggacaggcaggtcatggaggggatggtgccgcaagaggggggacggaaggtgatcttctggccggtgtggttgtactcggagtacacgtacttagcgggcttgcgcagctgggtggtgtggaagtcgaaccacaggtgggtgatggagtggttacggatgggaccagccaggatggagttgggggggaactgcttcatctcgacggtgatgttgtacagcttctgctggctggggaaggtgaagaacttgtagtagtcgccggtcttggaagccagctcttgcaggatacgcagcttcagctggcgttcctcttccttagccttctgggacttcacacggaaacgagccacagcgatcttgcagttgatgaagctgaacagcaggaaggtcagggacatcaggaagaacaggttgaacacgccacgcatctcgcccttgcgacccatggtggcctcgagatcccgggtgatcaagtcttcgtcgagtgattgtaaataaaatgtaatttacagtatagtattttaattaatatacaaatgatttgataataattcttatttaactataatatattgtgttgggttgaattaaaggtccgtatactagtatcgattcgcgacctactccggaatattaatagatcatggagataattaaaatgataaccatctcgcaaataaataagtattttactgttttcgtaacagttttgtaataaaaaaacctataaatattccggattattcataccgtcccaccatcgggcgcggatccgccaccatggaaaactggtccgctctggaactgctgcccaaggtcggaatccctaccgacttcctgacccacgtcaagacctccgctggcgaggaaatgttcgaggctctgaggatctactacggcgacgaccccgagcgttacaacatccacttcgaggctatcttcggcaccttctgcaaccgtctggaatgggtgtacttcctgacttccggcctggctgctgctgctcacgctatcaagttccacgacctgaacaagctgaccaccggcaagatgctgttccacgtgcaagtgccccgtgtggcttccggtgctggcctgcctacctcccgtcagaccaccatcatggtcaccaagtactccgagaagtcccccatcaccatccctttcgagctgtccgctgcttgcctgacttacctgcgtgaaaccttcgagggcaccatcctggacaagatcctgaacgtcgaggctatgcacaccgtgctgcgtgctctgaagaacaccgctgacgctatggaacgtggcctgatccacagcttcctccagaccctgctgaggaaggctcccccctacttcgtggtgcagaccctggtcgagaacgctaccctggctcgtcaggctctgaaccgtatccagcgctccaacatcctgcagtccttcaaggctaagatgctggctaccctgttcctgctgaaccgtacccgtgaccgtgactacgtgctgaagttcctgacccgtctggctgaggctgctaccgactccatcctcgacaaccctactacctacaccacctcctccggtgctaagatctccggtgtcatggtgtccaccgctaacgtgatgcagatcatcatgtccctgctgtcctcccacatcactaaggaaaccgtgtccgctcccgctacctacggcaacttcgtgctgtcccccgagaacgctgtgaccgctatctcctaccactctatcctggctgacttcaactcctacaaggctcacctgacctccggccagccccacctccccaacgactccctgagccaggctggtgctcactccctgacccccctgtccatggacgtgatccgtctgggcgaaaagaccgtgatcatggaaaacctgcgtcgcgtgtacaagaacaccgacaccaaggaccccctggaacgtaacgtggacctgaccttcttcttccccgtgggcctgtacctgcccgaggaccgtggttacaccaccgtcgagtccaaggtcaagctgaacgacaccgtgcgtaacgctctgcccaccaccgcttacctgctgaacagggaccgtgctgtgcaaaagatcgacttcgtggacgctctcaagaccctgtgccaccccgtgctgcacgagcctgctccatgcctgcaggctttcaccgagcgtggtcccccatccgagcccgctatgcagcgtctgctggaatgccgtttccagcaagagcccatgggtggtgctgctcgtcgtatcccccacttctaccgtgtgcgccgcgaggtgccccgtaccgtgaacgagatgaagcaggacttcgtggtcaccgacttctacaaggttggaaacatcaccctgtacaccgagctgcaccctttcttcgacttcacccactgccaagagaactccgagactgtggctctgtgcaccccccgtatcgtgatcggcaacctgcccgacggcctggctcccggtcccttccacgagctgaggacctgggagatcatggaacacatgcgcctgcgtcccccacccgactacgaggaaaccctgcgtctgttcaagaccaccgtgacctcccccaactaccccgagctgtgctacctggtggacgtgctggtgcacggcaacgctgacgctttcctgctgatccgcgctttcatcgctcgttgcatcgtgaacatgttccacacccgtcagctgctggtgttcgctcactcctacgctctggtcaccctgatcgctgagcacctggctgacggtgctctgcccccccagctcctgttccactaccgtaacctggtggctgtgctgcgcctggtcacccgtatctccgctctgcccggcctgaacaacggccagctggctgaggaacccctgtccgcttacgtgaacgctctgcacgaccacaggctgtggccccccttcgtgacccacctccctcgtaacatggaaggtgtccaggtggtggctgatcgtcagcccctgaaccccgctaacatcgaggctcgtcaccacggtgtctccgacgtgccccgtctgggtgctatggacgctgacgagcccctgttcgtggacgactaccgtgctaccgacgacgagtggaccctgcaaaaggtgttctacctgtgcctgatccccgctatgaccaacaaccgtgcttgcggcctgggcctgaacctcaagactctgctggtggacctgttctaccgtcccgccttcctgctcatgcccgctgctaccgctgtgtccacctccggcaccacctccaaggaatccacctctggtgtcacccccgaggactccgtggctgctcagcgtcaggctgtgggcgagatgctgaccgagctggtcgaggacgtggccaccgacgctcacacccctctgctgcaggcttgccgcgagctgttcctggctgtgcagttcgtgggcgagcacgtgaaggtgctggaagtgcgtgctcccctggaccacgctcagaggcagggactgcccgacttcatctcccgtcagcatgtgctgtacaacggttgctgcgtcgtgaccgctcctaagaccctgatcgagtactccctgcccgtgcccttccaccgtttctactccaaccccaccatctgcgctgctctgtccgacgacatcaagcgttacgtgaccgagttcccccactaccatagacacgatggtggtttccccctgcccaccgctttcgctcacgagtaccacaactggctgcgtagccccttctcccgttactccgctacctgccccaacgtgctgcactccgtgatgaccctggctgctatgctgtacaagatctcccccgtgtccctggtgctgcagaccaaggctcacatccaccccggtttcgctctgaccgctgtgcgtaccgacaccttcgaggtggacatgctgctgtactccggcaagtcctgcacctccgtcatcatcaacaaccccatcgtgaccaaggaagagagggacatctccaccacctaccacgtgacccagaacatcaacaccgtggacatgggcctgggttacacctccaacacttgcgtggcctacgtgaaccgcgtccgcaccgacatgggtgtccgtgtgcaggacctgttccgtgtgttccccatgaacgtgtaccgccacgatgaggtggaccgttggatcaggcacgctgctggcgtcgagcgtccccagctgctggacaccgagactatctccatgctgaccttcggttccatgtccgagcgcaacgctgctgctaccgtgcacggccagaaggctgtctgcgagctgatcctgacccctgtgactatggacgtgaactacttcaagatcaccaacaaccctcgtggtcgtgcttcctgcatgctgggcgtggacccctacgacaccgaggctgccaccaaggctatctacgaccaccgcgaggctgacgctcagaccttcgctgctacccacaacccatgggcttcccaggctggttgcctgtccgacgtcctgtacaacacccgtcaccgcgagcgtctgggctacaactccaagttctactccccctgcgctcagtacttcaacaccgaggaaatcatcgctgccaacaagaccctcttcaagaccatcgacgagtacctgctgcgcgctaaggactgcatccgtggcgacaccgacactcagtacgtgtgcgtcgagggaaccgagcagctgatcgagaacccttgccgtctgacccaagaggctctgcccatcctgtccaccaccaccctggctctgatggaaactaagctgaagggtggcgctggtgctttcgctacctccgagactcacttcggcaactacgtcgtgggagagatcatccccctgcagcagtccatgctgttcaacagctaagagctcaagcttgtcgagaagtactagaggatcataatcagccataccacatttgtagaggttttacttgctttaaaaaacctcccacacctccccctgaacctgaaacataaaatgaatgcaattgttgttgttaacttgtttattgcagcttataatggttacaaataaagcaatagcatcacaaatttcacaaataaagcatttttttcactgcattctagttgtggtttgtccaaactcatcaatgtatcttatcatgtctggatctgatcactgcttgagcctagaagatccggctgctaacaaagcccgaaaggaagctgagttggctgctgtggctagctttgtttaactttaagaaggagatacatctagaccggaatattaatagatcatggagataattaaaatgataaccatctcgcaaataaataagtattttactgttttcgtaacagttttgtaataaaaaaacctataaatattccggattattcataccgtcccaccatcgggcgcggatcccggtccgaagcgcgcggaattcaaaggcctacgtcgacgccaccatggaatcccgtggtcgtcgttgccccgagatgatctccgtgctgggtcccatctccggtcacgtcctgaaggctgtgttctcccgtggcgacacccccgtgctgccccacgaaactcgtctgctgcagaccggtatccacgtgcgtgtgtcccagccctccctgatcctggtgtcccagtacacccccgactccaccccttgccaccgcggagacaaccagctgcaggtccagcacacctacttcaccggttccgaggtcgagaacgtgtccgtgaacgtgcacaaccccaccggtcgttccatctgcccctcccaagagcccatgtccatctacgtgtacgctctgcccctgaagatgctgaacatcccctccatcaacgtgcaccactacccctccgctgctgagcgcaagcaccgtcacctccccgtggctgacgctgtgatccacgcttccggcaagcagatgtggcaggctcgtctgaccgtgtccggcctggcttggacccgtcagcagaaccagtggaaggaacccgacgtgtactacacctccgctttcgtgttccccaccaaggacgtggccctgcgtcacgtcgtgtgcgctcacgaactcgtgtgctccatggaaaacacccgtgctaccaagatgcaagtgatcggcgaccagtacgtgaaggtgtacctggaatccttctgcgaggacgtgccctccggcaagctgttcatgcacgtgaccctgggttccgacgtggaagaggacctgaccatgacccgtaacccccagcccttcatgcgtccccacgagcgtaacggtttcaccgtgctgtgccccaagaacatgatcatcaagcccggcaagatctcccacatcatgctggacgtggccttcacctcccacgagcacttcggcctgctgtgccctaagtccatccccggcctgtccatctccggcaacctgctgatgaacggccagcagatcttcctggaagtgcaggctatccgtgaaaccgtcgagctgcgtcagtacgaccctgtggctgctctgttcttcttcgacatcgacctgctgctgcagcgtggtccccagtactccgagcaccccaccttcaccagccagtaccgtatccagggcaagctggaataccgtcacacctgggaccgtcacgacgagggtgctgctcagggcgacgacgacgtgtggacctccggttccgactccgacgaggaactggtcaccaccgagcgcaagaccccccgtgtgaccggtggtggtgctatggctggtgcttccacctccgctggtcgcaagcgcaagtccgcttcctccgctaccgcttgcaccgctggtgtcatgacccgtggtcgcctgaaggctgagtccaccgtggctcccgaagaggacactgacgaggactccgacaacgagatccacaaccccgctgtgttcacctggcccccctggcaggctggtatcctggctcgtaacctggtgcccatggtggctaccgtgcagggccagaacctgaagtaccaagagttcttctgggacgccaacgacatctaccgtatcttcgctgagctggaaggcgtgtggcagcccgctgctcagcccaagcgtcgtcgtcaccgtcaggacgctctgcctggtccctgtatcgcttccacccccaagaagcaccgcggctaaaagcttgtcgagaagtactagaggatcataatcagccataccacatttgtagaggttttacttgctttaaaaaacctcccacacctccccctgaacctgaaacataaaatgaatgcaattgttgttgttaacttgtttattgcagcttataatggttacaaataaagcaatagcatcacaaatttcacaaataaagcatttttttcactgcattctagttgtggtttgtccaaactcatcaatgtatcttatcatgtctggatctgatcactgcttgagcctagaagatccggctgctaacaaagcccgaaaggaagctgagttggctgctgccaccgctgagcaataactatcataaccggaatattaatagatcatggagataattaaaatgataaccatctcgcaaataaataagtattttactgttttcgtaacagttttgtaataaaaaaacctataaatattccggattattcataccgtcccaccatcgggcgcggatcccggtccgaagcgcgcggaattcgccaccatgaccatggacgagcagcagccccaggctgtgacccccgtgtacgtgggcggtttcctggctcgttacgaccagtcccccgacgaggctgagctgctgctgccacgtgacgtggtcgaacactggctgcacgctcagggccagggacagccttccctgtccgtggctctgcccctgaacatcaaccacgacgacaccgctgtcgtgggtcacgtggccgctatgcagtccgtgcgtgacggcctgttctgcctgggttgcgtgacctccccccgtttcctggaaatcgtgcgtcgtgcttccgagaagtccgagctggtgtcccgtggtcccgtgtccccactgcagcccgacaaggtggtcgagttcctgtccggttcctacgctggcctgtccctgtcatcccgtcgttgcgacgacgtcgaggctgctacctccctgagcggctccgagactacccccttcaagcacgtggccctgtgctccgtgggtcgtaggcgtggaaccctggctgtgtacggtcgtgaccccgagtgggtcacccagcgtttccccgacctgaccgctgctgaccgtgacggactgcgtgctcagtggcagcgttgcggttccaccgctgtggacgcttccggcgaccccttccgttccgactcctacggcctgctgggcaactccgtggacgctctgtacatccgcgagcgtctgcccaagctgcgttacgacaagcagctcgtgggtgtcaccgagcgcgagtcctacgtgaaggcttccgtgtcccccgaggctgcttgcgacatcaaggctgcttccgctgagcgttctggcgacagccgctcccaggctgctactcctgctgctggtgctcgtgtgccctccagctccccatccccacctgtcgagcctccctcccccgtgcaacctcctgctctgcctgcttccccctccgtgctgcctgctgagtccagcccctccctgtcaccctctgagcctgctgaggctgcctccatgtcccaccctctgagcgctgctgtgactgctgctaccgctccccctggtgctactgtggctggtgcttcccccgctgtgccttccctggcttggcctcacgacggtgtctacctgcccaaggacgctttcttctccctgctgggcgcttcccgttccgctgctcccgtgatgtaccccggtgctgtggctgctccccccagcgcttcacctgctcctctgcccctgccctcctaccccgcttcctacggtgctcccgtcgtgggttacgaccagctggctgctcgtcacttcgctgactacgtggacccccactaccccggctggggtcgtcgttacgagcccgctccttccctgcacccatcctaccctgtgccccctcctccatcacccgcttactaccgtcgtcgtgactcccccggtggcatggacgagcctccatctggatgggagcgttacgacggttcccaccgtggccagtcccaaaagcagcaccgtcacggtggttccggtggtcacaacaagcgtcgcaaggaagccgctgctgcatcctccagctccgacgaggacctgagcttccccggcgaggctgaacacggtcgtgctcgcaagcgtctgaagtcccacgtgaactccgacggaggtagcggaggccacgctggttccaaccagcagcagcaacagcgctacgacgagctgcgtgacgctatccacgagctgaagcgtgacctgttcgctgctcgccagtcctccaccctgctgtctgctgctctgccagctgccgcttcttcctcccctaccaccaccaccgtgtgcacccctactggcgagctgacctctggtggtggcgagactcccaccgctctgctgtccggtggtgctaaggtggccgagcgtgctcaggctggtgtcgtgaacgcttcctgccgtctggctaccgcttccggttccgaggctgccaccgctggtccctctaccgctggttcctcatcctgcccagcttccgtggtgctggctgccgctgctgctcaagccgccgctgcttcacagtcccccccaaaggatatggtggacctgaaccgtcgtatcttcgtggctgctctgaacaagctcgagtaataaaagcttgtcgagaagtactagaggatcataatcagccataccacatttgtagaggttttacttgctttaaaaaacctcccacacctccccctgaacctgaaacataaaatgaatgcaattgttgttgttaacttgtttattgcagcttataatggttacaaataaagcaatagcatcacaaatttcacaaataaagcatttttttcactgcattctagttgtggtttgtccaaactcatcaatgtatcttatcatgtctggatctgatcactgcttgagcctagaagatccggctgctaacaaagcccgaaaggaagctgggaatattaatagatcatggagataattaaaatgataaccatctcgcaaataaataagtattttactgttttcgtaacagttttgtaataaaaaaacctataaatattccggattattcataccgtcccaccatcgggcgcggatccgccaccatggctgctatggaagctaacatcttctgcaccttcgaccacaagctgtctatcgctgacgtgggcaagctgaccaagctggtggctgctgtggtgcccatcccccagcgtctgcacctgatcaagcactaccagctgggcctgcaccagttcgtggaccacacccgtggttacgtgcgtctgcgtggcctgctgcgtaacatgaccctgaccctgatgcgtcgtgtcgagggcaaccagatcctgctgcacgtgcccacccacggcctgctgtacaccgtgctgaacaccggtcccgtgacctgggagaagggcgacgctctgtgcgtgctgccccccctgttccacggtcccctggctcgtgaaaacctgttgaccctgggccagtgggagctggtgctgccctggatcgtgcccatgcccctggctctggaaatcaaccagcgcctgctgatcatgggcctgttctccctggaccgttcctacgaagaagtgaaggctgctgtccagcagctgcagaccatcaccttccgtgacgctaccttcaccatccccgaccccgtgatcgaccagcacctcctgatcgacatgaagaccgcttgcctgtccatgtccatggtggctaacctggcttccgagctgaccatgacctacgtccgcaagctggctttggaggactcttccatgctgctggtcaagtgccaagagctgctgatgcgtctggaccgcgagcgttccgtgggcgagcctcgtactcccgctcgtcctcagcacgtgtcccccgacgacgagatcgctcgtctgtccgctctgttcgtgatgctgcgtcagctggacgacctgatccgcgagcaggtcgtgttcaccgtgtgcgacgtgagcccagacaacaagtccgctacctgcatcttcaagggccagctgttgaattttgaccttcttaagcttgcgggagacgtcgagtccaaccctgggcccatggccccctcccacgtggacaaggtgaacacccgcacctggtccgcctccatcgtgttcatggtgctgaccttcgtgaacgtgtccgtgcacctggtgctgtccaacttcccccacctgggctacccctgcgtgtactaccacgtggtggacttcgagcgcctgaacatgtccgcctacaacgtgatgcacctgcacacccccatgctgttcctggactccgtgcagctggtgtgctacgccgtgttcatgcagctggtgttcctggccgtgaccatctactacctggtgtgctggatcaagatctccatgcgcaaggacaagggcatgtccctgaaccagtccacccgcgacatctcctacatgggcgactccctgaccgccttcctgttcatcctgtccatggacaccttccagctgttcaccctgaccatgtccttccgcctgccctccatgatcgccttcatggccgccgtgcacttcttctgcctgaccatcttcaacgtgtccatggtgacccagtaccgctcctacaagcgctccctgttcttcttctcccgcctgcaccccaagctgaagggcaccgtgcagttccgcaccctgatcgtgaacctggtggaggtggccctgggcttcaacaccaccgtggtggccatggccctgtgctacggcttcggcaacaacttcttcgtgcgcaccggccacatggtgctggccgtgttcgtggtgtacgccatcatctccatcatctacttcctgctgatcgaggccgtgttcttccagtacgtgaaggtgcagttcggctaccacctgggcgccttcttcggcctgtgcggcctgatctaccccatcgtgcagtacgacaccttcctgtccaacgagtaccgcaccggcatctcctggtccttcggcatgctgttcttcatctgggccatgttcaccacctgccgcgccgtgcgctacttccgcggccgcggctccggctccgtgaagtaccaggccctggccaccgcctccggcgaggaggtggccgccctgtcccaccacgactccctggagtcccgccgcctgcgcgaggaggaggacgacgacgacgacgaggacttcgaggacgcctaagagctcaagcttgtcgagaagtactagaggatcataatcagccataccacatttgtagaggttttacttgctttaaaaaacctcccacacctccccctgaacctgaaacataaaatgaatgcaattgttgttgttaacttgtttattgcagcttataatggttacaaataaagcaatagcatcacaaatttcacaaataaagcatttttttcactgcattctagttgtggtttgtccaaactcatcaatgtatcttatcatgtctggatctgatcactgcttgagcctagaagatccggctgctaacaaagcccgaaaggaagctgagttggctgctgtggctagctttgtttaactttaagaaggagatacatctagaaatattaatagatcatggagataattaaaatgataaccatctcgcaaataaataagtattttactgttttcgtaacagttttgtaataaaaaaacctataaatattccggattattcataccgtcccaccatcgggcgcggatcccggtccgaagcgcgcggaattcaaaggcctacgccaccatggagtggaacacactagtactaggtcttttggttttatcggtagcggcaagttccaaccatacgtcgactgctagcacaccgagtccctctagctctactcacacctcaacgaccgtgaaggcaacgactactgcgacaactagtacaactacggtgacaagtacgacttcatcaacgactagtaccaaacccggttccaccactcacgaccccaatgtgatgagaccacatgctcacaatgatttttacaaggcgcattgtacatcgcatatgtatgaactttctctgtccagctttgcggcctggtggactatgcttaatgctctcattctcatgggagctttttgtatcgtactacgacattgctgtttccagaactttactgcaaccaccaccaaaggctattgataaaagcttgtcgagaagtactagaggatcataatcagccataccacatttgtagaggttttacttgctttaaaaaacctcccacacctccccctgaacctgaaacataaaatgaatgcaattgttgttgttaacttgtttattgcagcttataatggttacaaataaagcaatagcatcacaaatttcacaaataaagcatttttttcactgcattctagttgtggtttgtccaaactcatcaatgtatcttatcatgtctggatctgatcactgcttgagcctagaagatccggctgctaacaaagcccgaaaggaagctgagttggctgctgccaccgctgagcaataactatcataacccctaggagatccgaaccagataagtgaaatctagttccaaactattttgtcatttttaattttcgtattagcttacgacgctacacccagttcccatctattttgtcactcttccctaaataatccttaaaaactccatttccacccctcccagttcccaactattttgtccgcccaca

SEQ ID NO: 78 - DNA, 9594 bp, Artificial Sequence
  Synthetic construct
ttgttccagtttggaacaagagtccactattaaagaacgtggactccaacgtcaaagggcgaaaaaccgtctatcagggcgatggcccactacgtgaaccatcaccctaatcaagttttttggggtcgaggtgccgtaaagcactaaatcggaaccctaaagggagcccccgatttagagcttgacggggaaagccggcgaacgtggcgagaaaggaagggaagaaagcgaaaggagcgggcgctagggcgctggcaagtgtagcggtcacgctgcgcgtaaccaccacacccgccgcgcttaatgcgccgctacagggcgcgtcgcgccattcgccattcaggctgcgcaactgttgggaagggcgatcggtgcgggcctcttcgctattacgccagctggcgaaagggggatgtgctgcaaggcgattaagttgggtaacgccagggttttcccagtcacgacgttgtaaaacgacggccagtgcatagaccagccgcgtaacctggcaaaatcggttacggttgagtaataaatggatgccctgcgtaagcgggtgtgggcggacaataaagtcttaaactgaacaaaatagatctaaactatgacaataaagtcttaaactagacagaatagttgtaaactgaaatcagtccagttatgctgtgaaaaagcatactggacttttgttatggctaaagcaaactcttcattttctgaagtgcaaattgcccgtcgtattaaagaggggcgtggccaagggcatggtaaagactatattcgcggcgttgtgacaatttaccgaacaactccgcggccgggaagccgatctcggcttgaacgaattgttaggtggcggtacttgggtcgatatcaaagtgcatcacttcttcccgtatgcccaactttgtatagagagccactgcgggatcgtcaccgtaatctgcttgcacgtagatcacataagcaccaagcgcgttggcctcatgcttgaggagattgatgagcgcggtggcaatgccctgcctccggtgctcgccggagactgcgagatcatagatatagatctcactacgcggctgctcaaacttgggcagaacgtaagccgcgagagcgccaacaaccgcttcttggtcgaaggcagcaagcgcgatgaatgtcttactacggagcaagttcccgaggtaatcggagtccggctgatgttgggagtaggtggctacgtctccgaactcacgaccgaaaagatcaagagcagcccgcatggatttgacttggtcagggccgagcctacatgtgcgaatgatgcccatacttgagccacctaactttgttttagggcgactgccctgctgcgtaacatcgttgctgctgcgtaacatcgttgctgctccataacatcaaacatcgacccacggcgtaacgcgcttgctgcttggatgcccgaggcatagactgtacaaaaaaacagtcataacaagccatgaaaaccgccactgcgccgttaccaccgctgcgttcggtcaaggttctggaccagttgcgtgagcgcatacgctacttgcattacagtttacgaaccgaacaggcttatgtcaactgggttcgtgccttcatccgtttccacggtgtgcgtcacccggcaaccttgggcagcagcgaagtcgaggcatttctgtcctggctggcgaacgagcgcaaggtttcggtctccacgcatcgtcaggcattggcggccttgctgttcttctacggcaaggtgctgtgcacggatctgcccttgcttcaggagatcggtagacctcggccgtcgcggcgcttgccggtggtgctgaccccggatgaagtggttcgcatcctcggttttctggaaggcgagcatcgtttgttcgcccaggactctagctatagttctagtggttggctacagctttgtttgtactatcaacaggttgaactgctgatcaacagatcctctacgcggccgcggtaccataacttcgtatagcatacattatacgaagttatctggtttaaacgtacccgtagtggctatggcagggcttgccgccccgacgttggctgcgagccctgggccttcacccgaacttgggggttggggtggggaaaaggaagaaacgcgggcgtattggtcccaatggggtctcggtggggtatcgacagagtgccagccctgggaccgaaccccgcgtttatgaacaaacgacccaacacccgtgcgttttattctgtctttttattgccgtcatagcgcgggttccttccggtattgtctccttccgtgtttcagttagcctcccccatctcccggtaccgcatgctatgcatcagctgctagcaccatggctcgagatcccgggtgatcaagtcttcgtcgagtgattgtaaataaaatgtaatttacagtatagtattttaattaatatacaaatgatttgataataattcttatttaactataatatattgtgttgggttgaattaaaggtccgtatactagtatcgattcgcgacctactccggaatattaatagatcatggagataattaaaatgataaccatctcgcaaataaataagtattttactgttttcgtaacagttttgtaataaaaaaacctataaatattccggattattcataccgtcccaccatcgggcgcggatccgccaccatggaaaactggtccgctctggaactgctgcccaaggtcggaatccctaccgacttcctgacccacgtcaagacctccgctggcgaggaaatgttcgaggctctgaggatctactacggcgacgaccccgagcgttacaacatccacttcgaggctatcttcggcaccttctgcaaccgtctggaatgggtgtacttcctgacttccggcctggctgctgctgctcacgctatcaagttccacgacctgaacaagctgaccaccggcaagatgctgttccacgtgcaagtgccccgtgtggcttccggtgctggcctgcctacctcccgtcagaccaccatcatggtcaccaagtactccgagaagtcccccatcaccatccctttcgagctgtccgctgcttgcctgacttacctgcgtgaaaccttcgagggcaccatcctggacaagatcctgaacgtcgaggctatgcacaccgtgctgcgtgctctgaagaacaccgctgacgctatggaacgtggcctgatccacagcttcctccagaccctgctgaggaaggctcccccctacttcgtggtgcagaccctggtcgagaacgctaccctggctcgtcaggctctgaaccgtatccagcgctccaacatcctgcagtccttcaaggctaagatgctggctaccctgttcctgctgaaccgtacccgtgaccgtgactacgtgctgaagttcctgacccgtctggctgaggctgctaccgactccatcctcgacaaccctactacctacaccacctcctccggtgctaagatctccggtgtcatggtgtccaccgctaacgtgatgcagatcatcatgtccctgctgtcctcccacatcactaaggaaaccgtgtccgctcccgctacctacggcaacttcgtgctgtcccccgagaacgctgtgaccgctatctcctaccactctatcctggctgacttcaactcctacaaggctcacctgacctccggccagccccacctccccaacgactccctgagccaggctggtgctcactccctgacccccctgtccatggacgtgatccgtctgggcgaaaagaccgtgatcatggaaaacctgcgtcgcgtgtacaagaacaccgacaccaaggaccccctggaacgtaacgtggacctgaccttcttcttccccgtgggcctgtacctgcccgaggaccgtggttacaccaccgtcgagtccaaggtcaagctgaacgacaccgtgcgtaacgctctgcccaccaccgcttacctgctgaacagggaccgtgctgtgcaaaagatcgacttcgtggacgctctcaagaccctgtgccaccccgtgctgcacgagcctgctccatgcctgcaggctttcaccgagcgtggtcccccatccgagcccgctatgcagcgtctgctggaatgccgtttccagcaagagcccatgggtggtgctgctcgtcgtatcccccacttctaccgtgtgcgccgcgaggtgccccgtaccgtgaacgagatgaagcaggacttcgtggtcaccgacttctacaaggttggaaacatcaccctgtacaccgagctgcaccctttcttcgacttcacccactgccaagagaactccgagactgtggctctgtgcaccccccgtatcgtgatcggcaacctgcccgacggcctggctcccggtcccttccacgagctgaggacctgggagatcatggaacacatgcgcctgcgtcccccacccgactacgaggaaaccctgcgtctgttcaagaccaccgtgacctcccccaactaccccgagctgtgctacctggtggacgtgctggtgcacggcaacgctgacgctttcctgctgatccgcgctttcatcgctcgttgcatcgtgaacatgttccacacccgtcagctgctggtgttcgctcactcctacgctctggtcaccctgatcgctgagcacctggctgacggtgctctgcccccccagctcctgttccactaccgtaacctggtggctgtgctgcgcctggtcacccgtatctccgctctgcccggcctgaacaacggccagctggctgaggaacccctgtccgcttacgtgaacgctctgcacgaccacaggctgtggccccccttcgtgacccacctccctcgtaacatggaaggtgtccaggtggtggctgatcgtcagcccctgaaccccgctaacatcgaggctcgtcaccacggtgtctccgacgtgccccgtctgggtgctatggacgctgacgagcccctgttcgtggacgactaccgtgctaccgacgacgagtggaccctgcaaaaggtgttctacctgtgcctgatccccgctatgaccaacaaccgtgcttgcggcctgggcctgaacctcaagactctgctggtggacctgttctaccgtcccgccttcctgctcatgcccgctgctaccgctgtgtccacctccggcaccacctccaaggaatccacctctggtgtcacccccgaggactccgtggctgctcagcgtcaggctgtgggcgagatgctgaccgagctggtcgaggacgtggccaccgacgctcacacccctctgctgcaggcttgccgcgagctgttcctggctgtgcagttcgtgggcgagcacgtgaaggtgctggaagtgcgtgctcccctggaccacgctcagaggcagggactgcccgacttcatctcccgtcagcatgtgctgtacaacggttgctgcgtcgtgaccgctcctaagaccctgatcgagtactccctgcccgtgcccttccaccgtttctactccaaccccaccatctgcgctgctctgtccgacgacatcaagcgttacgtgaccgagttcccccactaccatagacacgatggtggtttccccctgcccaccgctttcgctcacgagtaccacaactggctgcgtagccccttctcccgttactccgctacctgccccaacgtgctgcactccgtgatgaccctggctgctatgctgtacaagatctcccccgtgtccctggtgctgcagaccaaggctcacatccaccccggtttcgctctgaccgctgtgcgtaccgacaccttcgaggtggacatgctgctgtactccggcaagtcctgcacctccgtcatcatcaacaaccccatcgtgaccaaggaagagagggacatctccaccacctaccacgtgacccagaacatcaacaccgtggacatgggcctgggttacacctccaacacttgcgtggcctacgtgaaccgcgtccgcaccgacatgggtgtccgtgtgcaggacctgttccgtgtgttccccatgaacgtgtaccgccacgatgaggtggaccgttggatcaggcacgctgctggcgtcgagcgtccccagctgctggacaccgagactatctccatgctgaccttcggttccatgtccgagcgcaacgctgctgctaccgtgcacggccagaaggctgtctgcgagctgatcctgacccctgtgactatggacgtgaactacttcaagatcaccaacaaccctcgtggtcgtgcttcctgcatgctgggcgtggacccctacgacaccgaggctgccaccaaggctatctacgaccaccgcgaggctgacgctcagaccttcgctgctacccacaacccatgggcttcccaggctggttgcctgtccgacgtcctgtacaacacccgtcaccgcgagcgtctgggctacaactccaagttctactccccctgcgctcagtacttcaacaccgaggaaatcatcgctgccaacaagaccctcttcaagaccatcgacgagtacctgctgcgcgctaaggactgcatccgtggcgacaccgacactcagtacgtgtgcgtcgagggaaccgagcagctgatcgagaacccttgccgtctgacccaagaggctctgcccatcctgtccaccaccaccctggctctgatggaaactaagctgaagggtggcgctggtgctttcgctacctccgagactcacttcggcaactacgtcgtgggagagatcatccccctgcagcagtccatgctgttcaacagctaagagctcaagcttgtcgagaagtactagaggatcataatcagccataccacatttgtagaggttttacttgctttaaaaaacctcccacacctccccctgaacctgaaacataaaatgaatgcaattgttgttgttaacttgtttattgcagcttataatggttacaaataaagcaatagcatcacaaatttcacaaataaagcatttttttcactgcattctagttgtggtttgtccaaactcatcaatgtatcttatcatgtctggatctgatcactgcttgagcctagaagatccggctgctaacaaagcccgaaaggaagctgagttggctgctgtggctagctttgtttaactttaagaaggagatacatctagaaatattaatagatcatggagataattaaaatgataaccatctcgcaaataaataagtattttactgttttcgtaacagttttgtaataaaaaaacctataaatattccggattattcataccgtcccaccatcgggcgcggatccgccaccatggctgctatggaagctaacatcttctgcaccttcgaccacaagctgtctatcgctgacgtgggcaagctgaccaagctggtggctgctgtggtgcccatcccccagcgtctgcacctgatcaagcactaccagctgggcctgcaccagttcgtggaccacacccgtggttacgtgcgtctgcgtggcctgctgcgtaacatgaccctgaccctgatgcgtcgtgtcgagggcaaccagatcctgctgcacgtgcccacccacggcctgctgtacaccgtgctgaacaccggtcccgtgacctgggagaagggcgacgctctgtgcgtgctgccccccctgttccacggtcccctggctcgtgaaaacctgttgaccctgggccagtgggagctggtgctgccctggatcgtgcccatgcccctggctctggaaatcaaccagcgcctgctgatcatgggcctgttctccctggaccgttcctacgaagaagtgaaggctgctgtccagcagctgcagaccatcaccttccgtgacgctaccttcaccatccccgaccccgtgatcgaccagcacctcctgatcgacatgaagaccgcttgcctgtccatgtccatggtggctaacctggcttccgagctgaccatgacctacgtccgcaagctggctttggaggactcttccatgctgctggtcaagtgccaagagctgctgatgcgtctggaccgcgagcgttccgtgggcgagcctcgtactcccgctcgtcctcagcacgtgtcccccgacgacgagatcgctcgtctgtccgctctgttcgtgatgctgcgtcagctggacgacctgatccgcgagcaggtcgtgttcaccgtgtgcgacgtgagcccagacaacaagtccgctacctgcatcttcaagggctaaggcgcgccaagcttgtcgagaagtactagaggatcataatcagccataccacatttgtagaggttttacttgctttaaaaaacctcccacacctccccctgaacctgaaacataaaatgaatgcaattgttgttgttaacttgtttattgcagcttataatggttacaaataaagcaatagcatcacaaatttcacaaataaagcatttttttcactgcattctagttgtggtttgtccaaactcatcaatgtatcttatcatgtctggatctgatcactgcttgagcctagaagatccggctgctaacaaagcccgaaaggaagctgagttggctgctgggtgcctaatgagtgagctaactcacattaattgcccggaatattaatagatcatggagataattaaaatgataaccatctcgcaaataaataagtattttactgttttcgtaacagttttgtaataaaaaaacctataaatattccggattattcataccgtcccaccatcgggcgcggatcccggtccgaagcgcgcggaattcaaaggcctacgtcgacgccaccatgtccaacaccgctcccggtcccaccgtggctaacaagcgtgacgagaagcaccgtcacgtggtcaacgtggtgctcgagctgcccaccgagatctccgaggctacccaccccgtgctggctaccatgctgtccaagtacacccgtatgtcctccctgttcaacgacaagtgcgctttcaagctggacctgctgcgtatggtggctgtgtcccgtacccgtcgctaaaagcttgtcgagaagtactagaggatcataatcagccataccacatttgtagaggttttacttgctttaaaaaacctcccacacctccccctgaacctgaaacataaaatgaatgcaattgttgttgttaacttgtttattgcagcttataatggttacaaataaagcaatagcatcacaaatttcacaaataaagcatttttttcactgcattctagttgtggtttgtccaaactcatcaatgtatcttatcatgtctggatctgatcactgcttgagcctagaagatccggctgctaacaaagcccgaaaggaagctgagttggctgctgccaccgctgagcaataactatcataacccctaggagatccgaaccagataagtgaaatctagttccaaactattttgtcatttttaattttcgtattagcttacgacgctacacccagttcccatctattttgtcactcttccctaaataatccttaaaaactccatttccacccctcccagttcccaactattttgtccgcccaca

SEQ ID NO: 79 - DNA, 11261 bp, Artificial Sequence
  Synthetic construct
ttgttccagtttggaacaagagtccactattaaagaacgtggactccaacgtcaaagggcgaaaaaccgtctatcagggcgatggcccactacgtgaaccatcaccctaatcaagttttttggggtcgaggtgccgtaaagcactaaatcggaaccctaaagggagcccccgatttagagcttgacggggaaagccggcgaacgtggcgagaaaggaagggaagaaagcgaaaggagcgggcgctagggcgctggcaagtgtagcggtcacgctgcgcgtaaccaccacacccgccgcgcttaatgcgccgctacagggcgcgtcgcgccattcgccattcaggctgcgcaactgttgggaagggcgatcggtgcgggcctcttcgctattacgccagctggcgaaagggggatgtgctgcaaggcgattaagttgggtaacgccagggttttcccagtcacgacgttgtaaaacgacggccagtgcatagaccagccgcgtaacctggcaaaatcggttacggttgagtaataaatggatgccctgcgtaagcgggtgtgggcggacaataaagtcttaaactgaacaaaatagatctaaactatgacaataaagtcttaaactagacagaatagttgtaaactgaaatcagtccagttatgctgtgaaaaagcatactggacttttgttatggctaaagcaaactcttcattttctgaagtgcaaattgcccgtcgtattaaagaggggcgtggccaagggcatggtaaagactatattcgcggcgttgtgacaatttaccgaacaactccgcggccgggaagccgatctcggcttgaacgaattgttaggtggcggtacttgggtcgatatcaaagtgcatcacttcttcccgtatgcccaactttgtatagagagccactgcgggatcgtcaccgtaatctgcttgcacgtagatcacataagcaccaagcgcgttggcctcatgcttgaggagattgatgagcgcggtggcaatgccctgcctccggtgctcgccggagactgcgagatcatagatatagatctcactacgcggctgctcaaacttgggcagaacgtaagccgcgagagcgccaacaaccgcttcttggtcgaaggcagcaagcgcgatgaatgtcttactacggagcaagttcccgaggtaatcggagtccggctgatgttgggagtaggtggctacgtctccgaactcacgaccgaaaagatcaagagcagcccgcatggatttgacttggtcagggccgagcctacatgtgcgaatgatgcccatacttgagccacctaactttgttttagggcgactgccctgctgcgtaacatcgttgctgctgcgtaacatcgttgctgctccataacatcaaacatcgacccacggcgtaacgcgcttgctgcttggatgcccgaggcatagactgtacaaaaaaacagtcataacaagccatgaaaaccgccactgcgccgttaccaccgctgcgttcggtcaaggttctggaccagttgcgtgagcgcatacgctacttgcattacagtttacgaaccgaacaggcttatgtcaactgggttcgtgccttcatccgtttccacggtgtgcgtcacccggcaaccttgggcagcagcgaagtcgaggcatttctgtcctggctggcgaacgagcgcaaggtttcggtctccacgcatcgtcaggcattggcggccttgctgttcttctacggcaaggtgctgtgcacggatctgcccttgcttcaggagatcggtagacctcggccgtcgcggcgcttgccggtggtgctgaccccggatgaagtggttcgcatcctcggttttctggaaggcgagcatcgtttgttcgcccaggactctagctatagttctagtggttggctacagctttgtttgtactatcaacaggttgaactgctgatcaacagatcctctacgcggccgcggtaccataacttcgtatagcatacattatacgaagttatctggtttaaacgtacccgtagtggctatggcagggcttgccgccccgacgttggctgcgagccctgggccttcacccgaacttgggggttggggtggggaaaaggaagaaacgcgggcgtattggtcccaatggggtctcggtggggtatcgacagagtgccagccctgggaccgaaccccgcgtttatgaacaaacgacccaacacccgtgcgttttattctgtctttttattgccgtcatagcgcgggttccttccggtattgtctccttccgtgtttcagttagcctcccccatctcccggtaccgcatgctatgcatcagctgctagcaccatggctcgagatcccgggtgatcaagtcttcgtcgagtgattgtaaataaaatgtaatttacagtatagtattttaattaatatacaaatgatttgataataattcttatttaactataatatattgtgttgggttgaattaaaggtccgtatactagtatcgattcgcgacctactccggaatattaatagatcatggagataattaaaatgataaccatctcgcaaataaataagtattttactgttttcgtaacagttttgtaataaaaaaacctataaatattccggattattcataccgtcccaccatcgggcgcggatccgccaccatggaaaactggtccgctctggaactgctgcccaaggtcggaatccctaccgacttcctgacccacgtcaagacctccgctggcgaggaaatgttcgaggctctgaggatctactacggcgacgaccccgagcgttacaacatccacttcgaggctatcttcggcaccttctgcaaccgtctggaatgggtgtacttcctgacttccggcctggctgctgctgctcacgctatcaagttccacgacctgaacaagctgaccaccggcaagatgctgttccacgtgcaagtgccccgtgtggcttccggtgctggcctgcctacctcccgtcagaccaccatcatggtcaccaagtactccgagaagtcccccatcaccatccctttcgagctgtccgctgcttgcctgacttacctgcgtgaaaccttcgagggcaccatcctggacaagatcctgaacgtcgaggctatgcacaccgtgctgcgtgctctgaagaacaccgctgacgctatggaacgtggcctgatccacagcttcctccagaccctgctgaggaaggctcccccctacttcgtggtgcagaccctggtcgagaacgctaccctggctcgtcaggctctgaaccgtatccagcgctccaacatcctgcagtccttcaaggctaagatgctggctaccctgttcctgctgaaccgtacccgtgaccgtgactacgtgctgaagttcctgacccgtctggctgaggctgctaccgactccatcctcgacaaccctactacctacaccacctcctccggtgctaagatctccggtgtcatggtgtccaccgctaacgtgatgcagatcatcatgtccctgctgtcctcccacatcactaaggaaaccgtgtccgctcccgctacctacggcaacttcgtgctgtcccccgagaacgctgtgaccgctatctcctaccactctatcctggctgacttcaactcctacaaggctcacctgacctccggccagccccacctccccaacgactccctgagccaggctggtgctcactccctgacccccctgtccatggacgtgatccgtctgggcgaaaagaccgtgatcatggaaaacctgcgtcgcgtgtacaagaacaccgacaccaaggaccccctggaacgtaacgtggacctgaccttcttcttccccgtgggcctgtacctgcccgaggaccgtggttacaccaccgtcgagtccaaggtcaagctgaacgacaccgtgcgtaacgctctgcccaccaccgcttacctgctgaacagggaccgtgctgtgcaaaagatcgacttcgtggacgctctcaagaccctgtgccaccccgtgctgcacgagcctgctccatgcctgcaggctttcaccgagcgtggtcccccatccgagcccgctatgcagcgtctgctggaatgccgtttccagcaagagcccatgggtggtgctgctcgtcgtatcccccacttctaccgtgtgcgccgcgaggtgccccgtaccgtgaacgagatgaagcaggacttcgtggtcaccgacttctacaaggttggaaacatcaccctgtacaccgagctgcaccctttcttcgacttcacccactgccaagagaactccgagactgtggctctgtgcaccccccgtatcgtgatcggcaacctgcccgacggcctggctcccggtcccttccacgagctgaggacctgggagatcatggaacacatgcgcctgcgtcccccacccgactacgaggaaaccctgcgtctgttcaagaccaccgtgacctcccccaactaccccgagctgtgctacctggtggacgtgctggtgcacggcaacgctgacgctttcctgctgatccgcgctttcatcgctcgttgcatcgtgaacatgttccacacccgtcagctgctggtgttcgctcactcctacgctctggtcaccctgatcgctgagcacctggctgacggtgctctgcccccccagctcctgttccactaccgtaacctggtggctgtgctgcgcctggtcacccgtatctccgctctgcccggcctgaacaacggccagctggctgaggaacccctgtccgcttacgtgaacgctctgcacgaccacaggctgtggccccccttcgtgacccacctccctcgtaacatggaaggtgtccaggtggtggctgatcgtcagcccctgaaccccgctaacatcgaggctcgtcaccacggtgtctccgacgtgccccgtctgggtgctatggacgctgacgagcccctgttcgtggacgactaccgtgctaccgacgacgagtggaccctgcaaaaggtgttctacctgtgcctgatccccgctatgaccaacaaccgtgcttgcggcctgggcctgaacctcaagactctgctggtggacctgttctaccgtcccgccttcctgctcatgcccgctgctaccgctgtgtccacctccggcaccacctccaaggaatccacctctggtgtcacccccgaggactccgtggctgctcagcgtcaggctgtgggcgagatgctgaccgagctggtcgaggacgtggccaccgacgctcacacccctctgctgcaggcttgccgcgagctgttcctggctgtgcagttcgtgggcgagcacgtgaaggtgctggaagtgcgtgctcccctggaccacgctcagaggcagggactgcccgacttcatctcccgtcagcatgtgctgtacaacggttgctgcgtcgtgaccgctcctaagaccctgatcgagtactccctgcccgtgcccttccaccgtttctactccaaccccaccatctgcgctgctctgtccgacgacatcaagcgttacgtgaccgagttcccccactaccatagacacgatggtggtttccccctgcccaccgctttcgctcacgagtaccacaactggctgcgtagccccttctcccgttactccgctacctgccccaacgtgctgcactccgtgatgaccctggctgctatgctgtacaagatctcccccgtgtccctggtgctgcagaccaaggctcacatccaccccggtttcgctctgaccgctgtgcgtaccgacaccttcgaggtggacatgctgctgtactccggcaagtcctgcacctccgtcatcatcaacaaccccatcgtgaccaaggaagagagggacatctccaccacctaccacgtgacccagaacatcaacaccgtggacatgggcctgggttacacctccaacacttgcgtggcctacgtgaaccgcgtccgcaccgacatgggtgtccgtgtgcaggacctgttccgtgtgttccccatgaacgtgtaccgccacgatgaggtggaccgttggatcaggcacgctgctggcgtcgagcgtccccagctgctggacaccgagactatctccatgctgaccttcggttccatgtccgagcgcaacgctgctgctaccgtgcacggccagaaggctgtctgcgagctgatcctgacccctgtgactatggacgtgaactacttcaagatcaccaacaaccctcgtggtcgtgcttcctgcatgctgggcgtggacccctacgacaccgaggctgccaccaaggctatctacgaccaccgcgaggctgacgctcagaccttcgctgctacccacaacccatgggcttcccaggctggttgcctgtccgacgtcctgtacaacacccgtcaccgcgagcgtctgggctacaactccaagttctactccccctgcgctcagtacttcaacaccgaggaaatcatcgctgccaacaagaccctcttcaagaccatcgacgagtacctgctgcgcgctaaggactgcatccgtggcgacaccgacactcagtacgtgtgcgtcgagggaaccgagcagctgatcgagaacccttgccgtctgacccaagaggctctgcccatcctgtccaccaccaccctggctctgatggaaactaagctgaagggtggcgctggtgctttcgctacctccgagactcacttcggcaactacgtcgtgggagagatcatccccctgcagcagtccatgctgttcaacagctaagagctcaagcttgtcgagaagtactagaggatcataatcagccataccacatttgtagaggttttacttgctttaaaaaacctcccacacctccccctgaacctgaaacataaaatgaatgcaattgttgttgttaacttgtttattgcagcttataatggttacaaataaagcaatagcatcacaaatttcacaaataaagcatttttttcactgcattctagttgtggtttgtccaaactcatcaatgtatcttatcatgtctggatctgatcactgcttgagcctagaagatccggctgctaacaaagcccgaaaggaagctgagttggctgctgtggctagctttgtttaactttaagaaggagatacatctagaaatattaatagatcatggagataattaaaatgataaccatctcgcaaataaataagtattttactgttttcgtaacagttttgtaataaaaaaacctataaatattccggattattcataccgtcccaccatcgggcgcggatccgccaccatggctgctatggaagctaacatcttctgcaccttcgaccacaagctgtctatcgctgacgtgggcaagctgaccaagctggtggctgctgtggtgcccatcccccagcgtctgcacctgatcaagcactaccagctgggcctgcaccagttcgtggaccacacccgtggttacgtgcgtctgcgtggcctgctgcgtaacatgaccctgaccctgatgcgtcgtgtcgagggcaaccagatcctgctgcacgtgcccacccacggcctgctgtacaccgtgctgaacaccggtcccgtgacctgggagaagggcgacgctctgtgcgtgctgccccccctgttccacggtcccctggctcgtgaaaacctgttgaccctgggccagtgggagctggtgctgccctggatcgtgcccatgcccctggctctggaaatcaaccagcgcctgctgatcatgggcctgttctccctggaccgttcctacgaagaagtgaaggctgctgtccagcagctgcagaccatcaccttccgtgacgctaccttcaccatccccgaccccgtgatcgaccagcacctcctgatcgacatgaagaccgcttgcctgtccatgtccatggtggctaacctggcttccgagctgaccatgacctacgtccgcaagctggctttggaggactcttccatgctgctggtcaagtgccaagagctgctgatgcgtctggaccgcgagcgttccgtgggcgagcctcgtactcccgctcgtcctcagcacgtgtcccccgacgacgagatcgctcgtctgtccgctctgttcgtgatgctgcgtcagctggacgacctgatccgcgagcaggtcgtgttcaccgtgtgcgacgtgagcccagacaacaagtccgctacctgcatcttcaagggctaaggcgcgccaagcttgtcgagaagtactagaggatcataatcagccataccacatttgtagaggttttacttgctttaaaaaacctcccacacctccccctgaacctgaaacataaaatgaatgcaattgttgttgttaacttgtttattgcagcttataatggttacaaataaagcaatagcatcacaaatttcacaaataaagcatttttttcactgcattctagttgtggtttgtccaaactcatcaatgtatcttatcatgtctggatctgatcactgcttgagcctagaagatccggctgctaacaaagcccgaaaggaagctgagttggctgctgggtgcctaatgagtgagctaactcacattaattgcccggaatattaatagatcatggagataattaaaatgataaccatctcgcaaataaataagtattttactgttttcgtaacagttttgtaataaaaaaacctataaatattccggattattcataccgtcccaccatcgggcgcggatcccggtccgaagcgcgcggaattcaaaggcctacgtcgacgccaccatgtccaacaccgctcccggtcccaccgtggctaacaagcgtgacgagaagcaccgtcacgtggtcaacgtggtgctcgagctgcccaccgagatctccgaggctacccaccccgtgctggctaccatgctgtccaagtacacccgtatgtcctccctgttcaacgacaagtgcgctttcaagctggacctgctgcgtatggtggctgtgtcccgtacccgtcgctaaaagcttgtcgagaagtactagaggatcataatcagccataccacatttgtagaggttttacttgctttaaaaaacctcccacacctccccctgaacctgaaacataaaatgaatgcaattgttgttgttaacttgtttattgcagcttataatggttacaaataaagcaatagcatcacaaatttcacaaataaagcatttttttcactgcattctagttgtggtttgtccaaactcatcaatgtatcttatcatgtctggatctgatcactgcttgagcctagaagatccggctgctaacaaagcccgaaaggaagctgagttggctgctgggtgcctaatgagtgagctaactcacattaattgcccggaatattaatagatcatggagataattaaaatgataaccatctcgcaaataaataagtattttactgttttcgtaacagttttgtaataaaaaaacctataaatattccggattattcataccgtcccaccatcgggcgcggatcccggtccgaagcgcgcggaattcaaaggcctacatggccccctcccacgtggacaaggtgaacacccgcacctggtccgcctccatcgtgttcatggtgctgaccttcgtgaacgtgtccgtgcacctggtgctgtccaacttcccccacctgggctacccctgcgtgtactaccacgtggtggacttcgagcgcctgaacatgtccgcctacaacgtgatgcacctgcacacccccatgctgttcctggactccgtgcagctggtgtgctacgccgtgttcatgcagctggtgttcctggccgtgaccatctactacctggtgtgctggatcaagatctccatgcgcaaggacaagggcatgtccctgaaccagtccacccgcgacatctcctacatgggcgactccctgaccgccttcctgttcatcctgtccatggacaccttccagctgttcaccctgaccatgtccttccgcctgccctccatgatcgccttcatggccgccgtgcacttcttctgcctgaccatcttcaacgtgtccatggtgacccagtaccgctcctacaagcgctccctgttcttcttctcccgcctgcaccccaagctgaagggcaccgtgcagttccgcaccctgatcgtgaacctggtggaggtggccctgggcttcaacaccaccgtggtggccatggccctgtgctacggcttcggcaacaacttcttcgtgcgcaccggccacatggtgctggccgtgttcgtggtgtacgccatcatctccatcatctacttcctgctgatcgaggccgtgttcttccagtacgtgaaggtgcagttcggctaccacctgggcgccttcttcggcctgtgcggcctgatctaccccatcgtgcagtacgacaccttcctgtccaacgagtaccgcaccggcatctcctggtccttcggcatgctgttcttcatctgggccatgttcaccacctgccgcgccgtgcgctacttccgcggccgcggctccggctccgtgaagtaccaggccctggccaccgcctccggcgaggaggtggccgccctgtcccaccacgactccctggagtcccgccgcctgcgcgaggaggaggacgacgacgacgacgaggacttcgaggacgcctaaaagcttgtcgagaagtactagaggatcataatcagccataccacatttgtagaggttttacttgctttaaaaaacctcccacacctccccctgaacctgaaacataaaatgaatgcaattgttgttgttaacttgtttattgcagcttataatggttacaaataaagcaatagcatcacaaatttcacaaataaagcatttttttcactgcattctagttgtggtttgtccaaactcatcaatgtatcttatcatgtctggatctgatcactgcttgagcctagaagatccggctgctaacaaagcccgaaaggaagctgagttggctgctgccaccgctgagcaataactatcataacccctaggagatccgaaccagataagtgaaatctagttccaaactattttgtcatttttaattttcgtattagcttacgacgctacacccagttcccatctattttgtcactcttccctaaataatccttaaaaactccatttccacccctcccagttcccaactattttgtccgcccaca

SEQ ID NO: 80 - DNA, 11840 bp, Artificial Sequence
  Synthetic construct
ttgttccagtttggaacaagagtccactattaaagaacgtggactccaacgtcaaagggcgaaaaaccgtctatcagggcgatggcccactacgtgaaccatcaccctaatcaagttttttggggtcgaggtgccgtaaagcactaaatcggaaccctaaagggagcccccgatttagagcttgacggggaaagccggcgaacgtggcgagaaaggaagggaagaaagcgaaaggagcgggcgctagggcgctggcaagtgtagcggtcacgctgcgcgtaaccaccacacccgccgcgcttaatgcgccgctacagggcgcgtcgcgccattcgccattcaggctgcgcaactgttgggaagggcgatcggtgcgggcctcttcgctattacgccagctggcgaaagggggatgtgctgcaaggcgattaagttgggtaacgccagggttttcccagtcacgacgttgtaaaacgacggccagtgcatagaccagccgcgtaacctggcaaaatcggttacggttgagtaataaatggatgccctgcgtaagcgggtgtgggcggacaataaagtcttaaactgaacaaaatagatctaaactatgacaataaagtcttaaactagacagaatagttgtaaactgaaatcagtccagttatgctgtgaaaaagcatactggacttttgttatggctaaagcaaactcttcattttctgaagtgcaaattgcccgtcgtattaaagaggggcgtggccaagggcatggtaaagactatattcgcggcgttgtgacaatttaccgaacaactccgcggccgggaagccgatctcggcttgaacgaattgttaggtggcggtacttgggtcgatatcaaagtgcatcacttcttcccgtatgcccaactttgtatagagagccactgcgggatcgtcaccgtaatctgcttgcacgtagatcacataagcaccaagcgcgttggcctcatgcttgaggagattgatgagcgcggtggcaatgccctgcctccggtgctcgccggagactgcgagatcatagatatagatctcactacgcggctgctcaaacttgggcagaacgtaagccgcgagagcgccaacaaccgcttcttggtcgaaggcagcaagcgcgatgaatgtcttactacggagcaagttcccgaggtaatcggagtccggctgatgttgggagtaggtggctacgtctccgaactcacgaccgaaaagatcaagagcagcccgcatggatttgacttggtcagggccgagcctacatgtgcgaatgatgcccatacttgagccacctaactttgttttagggcgactgccctgctgcgtaacatcgttgctgctgcgtaacatcgttgctgctccataacatcaaacatcgacccacggcgtaacgcgcttgctgcttggatgcccgaggcatagactgtacaaaaaaacagtcataacaagccatgaaaaccgccactgcgccgttaccaccgctgcgttcggtcaaggttctggaccagttgcgtgagcgcatacgctacttgcattacagtttacgaaccgaacaggcttatgtcaactgggttcgtgccttcatccgtttccacggtgtgcgtcacccggcaaccttgggcagcagcgaagtcgaggcatttctgtcctggctggcgaacgagcgcaaggtttcggtctccacgcatcgtcaggcattggcggccttgctgttcttctacggcaaggtgctgtgcacggatctgcccttgcttcaggagatcggtagacctcggccgtcgcggcgcttgccggtggtgctgaccccggatgaagtggttcgcatcctcggttttctggaaggcgagcatcgtttgttcgcccaggactctagctatagttctagtggttggctacagctttgtttgtactatcaacaggttgaactgctgatcaacagatcctctacgcggccgcggtaccataacttcgtatagcatacattatacgaagttatctggtttaaacgtacccgtagtggctatggcagggcttgccgccccgacgttggctgcgagccctgggccttcacccgaacttgggggttggggtggggaaaaggaagaaacgcgggcgtattggtcccaatggggtctcggtggggtatcgacagagtgccagccctgggaccgaaccccgcgtttatgaacaaacgacccaacacccgtgcgttttattctgtctttttattgccgtcatagcgcgggttccttccggtattgtctccttccgtgtttcagttagcctcccccatctcccggtaccgcatgctatgcatcagctgctagcaccatggctcgagatcccgggtgatcaagtcttcgtcgagtgattgtaaataaaatgtaatttacagtatagtattttaattaatatacaaatgatttgataataattcttatttaactataatatattgtgttgggttgaattaaaggtccgtatactagtatcgattcgcgacctactccggaatattaatagatcatggagataattaaaatgataaccatctcgcaaataaataagtattttactgttttcgtaacagttttgtaataaaaaaacctataaatattccggattattcataccgtcccaccatcgggcgcggatccgccaccatggaaaactggtccgctctggaactgctgcccaaggtcggaatccctaccgacttcctgacccacgtcaagacctccgctggcgaggaaatgttcgaggctctgaggatctactacggcgacgaccccgagcgttacaacatccacttcgaggctatcttcggcaccttctgcaaccgtctggaatgggtgtacttcctgacttccggcctggctgctgctgctcacgctatcaagttccacgacctgaacaagctgaccaccggcaagatgctgttccacgtgcaagtgccccgtgtggcttccggtgctggcctgcctacctcccgtcagaccaccatcatggtcaccaagtactccgagaagtcccccatcaccatccctttcgagctgtccgctgcttgcctgacttacctgcgtgaaaccttcgagggcaccatcctggacaagatcctgaacgtcgaggctatgcacaccgtgctgcgtgctctgaagaacaccgctgacgctatggaacgtggcctgatccacagcttcctccagaccctgctgaggaaggctcccccctacttcgtggtgcagaccctggtcgagaacgctaccctggctcgtcaggctctgaaccgtatccagcgctccaacatcctgcagtccttcaaggctaagatgctggctaccctgttcctgctgaaccgtacccgtgaccgtgactacgtgctgaagttcctgacccgtctggctgaggctgctaccgactccatcctcgacaaccctactacctacaccacctcctccggtgctaagatctccggtgtcatggtgtccaccgctaacgtgatgcagatcatcatgtccctgctgtcctcccacatcactaaggaaaccgtgtccgctcccgctacctacggcaacttcgtgctgtcccccgagaacgctgtgaccgctatctcctaccactctatcctggctgacttcaactcctacaaggctcacctgacctccggccagccccacctccccaacgactccctgagccaggctggtgctcactccctgacccccctgtccatggacgtgatccgtctgggcgaaaagaccgtgatcatggaaaacctgcgtcgcgtgtacaagaacaccgacaccaaggaccccctggaacgtaacgtggacctgaccttcttcttccccgtgggcctgtacctgcccgaggaccgtggttacaccaccgtcgagtccaaggtcaagctgaacgacaccgtgcgtaacgctctgcccaccaccgcttacctgctgaacagggaccgtgctgtgcaaaagatcgacttcgtggacgctctcaagaccctgtgccaccccgtgctgcacgagcctgctccatgcctgcaggctttcaccgagcgtggtcccccatccgagcccgctatgcagcgtctgctggaatgccgtttccagcaagagcccatgggtggtgctgctcgtcgtatcccccacttctaccgtgtgcgccgcgaggtgccccgtaccgtgaacgagatgaagcaggacttcgtggtcaccgacttctacaaggttggaaacatcaccctgtacaccgagctgcaccctttcttcgacttcacccactgccaagagaactccgagactgtggctctgtgcaccccccgtatcgtgatcggcaacctgcccgacggcctggctcccggtcccttccacgagctgaggacctgggagatcatggaacacatgcgcctgcgtcccccacccgactacgaggaaaccctgcgtctgttcaagaccaccgtgacctcccccaactaccccgagctgtgctacctggtggacgtgctggtgcacggcaacgctgacgctttcctgctgatccgcgctttcatcgctcgttgcatcgtgaacatgttccacacccgtcagctgctggtgttcgctcactcctacgctctggtcaccctgatcgctgagcacctggctgacggtgctctgcccccccagctcctgttccactaccgtaacctggtggctgtgctgcgcctggtcacccgtatctccgctctgcccggcctgaacaacggccagctggctgaggaacccctgtccgcttacgtgaacgctctgcacgaccacaggctgtggccccccttcgtgacccacctccctcgtaacatggaaggtgtccaggtggtggctgatcgtcagcccctgaaccccgctaacatcgaggctcgtcaccacggtgtctccgacgtgccccgtctgggtgctatggacgctgacgagcccctgttcgtggacgactaccgtgctaccgacgacgagtggaccctgcaaaaggtgttctacctgtgcctgatccccgctatgaccaacaaccgtgcttgcggcctgggcctgaacctcaagactctgctggtggacctgttctaccgtcccgccttcctgctcatgcccgctgctaccgctgtgtccacctccggcaccacctccaaggaatccacctctggtgtcacccccgaggactccgtggctgctcagcgtcaggctgtgggcgagatgctgaccgagctggtcgaggacgtggccaccgacgctcacacccctctgctgcaggcttgccgcgagctgttcctggctgtgcagttcgtgggcgagcacgtgaaggtgctggaagtgcgtgctcccctggaccacgctcagaggcagggactgcccgacttcatctcccgtcagcatgtgctgtacaacggttgctgcgtcgtgaccgctcctaagaccctgatcgagtactccctgcccgtgcccttccaccgtttctactccaaccccaccatctgcgctgctctgtccgacgacatcaagcgttacgtgaccgagttcccccactaccatagacacgatggtggtttccccctgcccaccgctttcgctcacgagtaccacaactggctgcgtagccccttctcccgttactccgctacctgccccaacgtgctgcactccgtgatgaccctggctgctatgctgtacaagatctcccccgtgtccctggtgctgcagaccaaggctcacatccaccccggtttcgctctgaccgctgtgcgtaccgacaccttcgaggtggacatgctgctgtactccggcaagtcctgcacctccgtcatcatcaacaaccccatcgtgaccaaggaagagagggacatctccaccacctaccacgtgacccagaacatcaacaccgtggacatgggcctgggttacacctccaacacttgcgtggcctacgtgaaccgcgtccgcaccgacatgggtgtccgtgtgcaggacctgttccgtgtgttccccatgaacgtgtaccgccacgatgaggtggaccgttggatcaggcacgctgctggcgtcgagcgtccccagctgctggacaccgagactatctccatgctgaccttcggttccatgtccgagcgcaacgctgctgctaccgtgcacggccagaaggctgtctgcgagctgatcctgacccctgtgactatggacgtgaactacttcaagatcaccaacaaccctcgtggtcgtgcttcctgcatgctgggcgtggacccctacgacaccgaggctgccaccaaggctatctacgaccaccgcgaggctgacgctcagaccttcgctgctacccacaacccatgggcttcccaggctggttgcctgtccgacgtcctgtacaacacccgtcaccgcgagcgtctgggctacaactccaagttctactccccctgcgctcagtacttcaacaccgaggaaatcatcgctgccaacaagaccctcttcaagaccatcgacgagtacctgctgcgcgctaaggactgcatccgtggcgacaccgacactcagtacgtgtgcgtcgagggaaccgagcagctgatcgagaacccttgccgtctgacccaagaggctctgcccatcctgtccaccaccaccctggctctgatggaaactaagctgaagggtggcgctggtgctttcgctacctccgagactcacttcggcaactacgtcgtgggagagatcatccccctgcagcagtccatgctgttcaacagctaagagctcaagcttgtcgagaagtactagaggatcataatcagccataccacatttgtagaggttttacttgctttaaaaaacctcccacacctccccctgaacctgaaacataaaatgaatgcaattgttgttgttaacttgtttattgcagcttataatggttacaaataaagcaatagcatcacaaatttcacaaataaagcatttttttcactgcattctagttgtggtttgtccaaactcatcaatgtatcttatcatgtctggatctgatcactgcttgagcctagaagatccggctgctaacaaagcccgaaaggaagctgagttggctgctgtggctagctttgtttaactttaagaaggagatacatctagaaatattaatagatcatggagataattaaaatgataaccatctcgcaaataaataagtattttactgttttcgtaacagttttgtaataaaaaaacctataaatattccggattattcataccgtcccaccatcgggcgcggatccgccaccatggctgctatggaagctaacatcttctgcaccttcgaccacaagctgtctatcgctgacgtgggcaagctgaccaagctggtggctgctgtggtgcccatcccccagcgtctgcacctgatcaagcactaccagctgggcctgcaccagttcgtggaccacacccgtggttacgtgcgtctgcgtggcctgctgcgtaacatgaccctgaccctgatgcgtcgtgtcgagggcaaccagatcctgctgcacgtgcccacccacggcctgctgtacaccgtgctgaacaccggtcccgtgacctgggagaagggcgacgctctgtgcgtgctgccccccctgttccacggtcccctggctcgtgaaaacctgttgaccctgggccagtgggagctggtgctgccctggatcgtgcccatgcccctggctctggaaatcaaccagcgcctgctgatcatgggcctgttctccctggaccgttcctacgaagaagtgaaggctgctgtccagcagctgcagaccatcaccttccgtgacgctaccttcaccatccccgaccccgtgatcgaccagcacctcctgatcgacatgaagaccgcttgcctgtccatgtccatggtggctaacctggcttccgagctgaccatgacctacgtccgcaagctggctttggaggactcttccatgctgctggtcaagtgccaagagctgctgatgcgtctggaccgcgagcgttccgtgggcgagcctcgtactcccgctcgtcctcagcacgtgtcccccgacgacgagatcgctcgtctgtccgctctgttcgtgatgctgcgtcagctggacgacctgatccgcgagcaggtcgtgttcaccgtgtgcgacgtgagcccagacaacaagtccgctacctgcatcttcaagggctaaggcgcgccaagcttgtcgagaagtactagaggatcataatcagccataccacatttgtagaggttttacttgctttaaaaaacctcccacacctccccctgaacctgaaacataaaatgaatgcaattgttgttgttaacttgtttattgcagcttataatggttacaaataaagcaatagcatcacaaatttcacaaataaagcatttttttcactgcattctagttgtggtttgtccaaactcatcaatgtatcttatcatgtctggatctgatcactgcttgagcctagaagatccggctgctaacaaagcccgaaaggaagctgagttggctgctgggtgcctaatgagtgagctaactcacattaattgcccggaatattaatagatcatggagataattaaaatgataaccatctcgcaaataaataagtattttactgttttcgtaacagttttgtaataaaaaaacctataaatattccggattattcataccgtcccaccatcgggcgcggatcccggtccgaagcgcgcggaattcaaaggcctacgtcgacgccaccatgtccaacaccgctcccggtcccaccgtggctaacaagcgtgacgagaagcaccgtcacgtggtcaacgtggtgctcgagctgcccaccgagatctccgaggctacccaccccgtgctggctaccatgctgtccaagtacacccgtatgtcctccctgttcaacgacaagtgcgctttcaagctggacctgctgcgtatggtggctgtgtcccgtacccgtcgctaaaagcttgtcgagaagtactagaggatcataatcagccataccacatttgtagaggttttacttgctttaaaaaacctcccacacctccccctgaacctgaaacataaaatgaatgcaattgttgttgttaacttgtttattgcagcttataatggttacaaataaagcaatagcatcacaaatttcacaaataaagcatttttttcactgcattctagttgtggtttgtccaaactcatcaatgtatcttatcatgtctggatctgatcactgcttgagcctagaagatccggctgctaacaaagcccgaaaggaagctgagttggctgctgggtgcctaatgagtgagctaactcacattaattgcccggaatattaatagatcatggagataattaaaatgataaccatctcgcaaataaataagtattttactgttttcgtaacagttttgtaataaaaaaacctataaatattccggattattcataccgtcccaccatcgggcgcggatcccggtccgaagcgcgcggaattcaaaggcctacgtcgacgccaccatggaatcccgtggtcgtcgttgccccgagatgatctccgtgctgggtcccatctccggtcacgtcctgaaggctgtgttctcccgtggcgacacccccgtgctgccccacgaaactcgtctgctgcagaccggtatccacgtgcgtgtgtcccagccctccctgatcctggtgtcccagtacacccccgactccaccccttgccaccgcggagacaaccagctgcaggtccagcacacctacttcaccggttccgaggtcgagaacgtgtccgtgaacgtgcacaaccccaccggtcgttccatctgcccctcccaagagcccatgtccatctacgtgtacgctctgcccctgaagatgctgaacatcccctccatcaacgtgcaccactacccctccgctgctgagcgcaagcaccgtcacctccccgtggctgacgctgtgatccacgcttccggcaagcagatgtggcaggctcgtctgaccgtgtccggcctggcttggacccgtcagcagaaccagtggaaggaacccgacgtgtactacacctccgctttcgtgttccccaccaaggacgtggccctgcgtcacgtcgtgtgcgctcacgaactcgtgtgctccatggaaaacacccgtgctaccaagatgcaagtgatcggcgaccagtacgtgaaggtgtacctggaatccttctgcgaggacgtgccctccggcaagctgttcatgcacgtgaccctgggttccgacgtggaagaggacctgaccatgacccgtaacccccagcccttcatgcgtccccacgagcgtaacggtttcaccgtgctgtgccccaagaacatgatcatcaagcccggcaagatctcccacatcatgctggacgtggccttcacctcccacgagcacttcggcctgctgtgccctaagtccatccccggcctgtccatctccggcaacctgctgatgaacggccagcagatcttcctggaagtgcaggctatccgtgaaaccgtcgagctgcgtcagtacgaccctgtggctgctctgttcttcttcgacatcgacctgctgctgcagcgtggtccccagtactccgagcaccccaccttcaccagccagtaccgtatccagggcaagctggaataccgtcacacctgggaccgtcacgacgagggtgctgctcagggcgacgacgacgtgtggacctccggttccgactccgacgaggaactggtcaccaccgagcgcaagaccccccgtgtgaccggtggtggtgctatggctggtgcttccacctccgctggtcgcaagcgcaagtccgcttcctccgctaccgcttgcaccgctggtgtcatgacccgtggtcgcctgaaggctgagtccaccgtggctcccgaagaggacactgacgaggactccgacaacgagatccacaaccccgctgtgttcacctggcccccctggcaggctggtatcctggctcgtaacctggtgcccatggtggctaccgtgcagggccagaacctgaagtaccaagagttcttctgggacgccaacgacatctaccgtatcttcgctgagctggaaggcgtgtggcagcccgctgctcagcccaagcgtcgtcgtcaccgtcaggacgctctgcctggtccctgtatcgcttccacccccaagaagcaccgcggctaaaagcttgtcgagaagtactagaggatcataatcagccataccacatttgtagaggttttacttgctttaaaaaacctcccacacctccccctgaacctgaaacataaaatgaatgcaattgttgttgttaacttgtttattgcagcttataatggttacaaataaagcaatagcatcacaaatttcacaaataaagcatttttttcactgcattctagttgtggtttgtccaaactcatcaatgtatcttatcatgtctggatctgatcactgcttgagcctagaagatccggctgctaacaaagcccgaaaggaagctgagttggctgctgccaccgctgagcaataactatcataacccctaggagatccgaaccagataagtgaaatctagttccaaactattttgtcatttttaattttcgtattagcttacgacgctacacccagttcccatctattttgtcactcttccctaaataatccttaaaaactccatttccacccctcccagttcccaactattttgtccgcccaca

SEQ ID NO: 81 - DNA, 13439 bp, Artificial Sequence
  Synthetic construct
ttgttccagtttggaacaagagtccactattaaagaacgtggactccaacgtcaaagggcgaaaaaccgtctatcagggcgatggcccactacgtgaaccatcaccctaatcaagttttttggggtcgaggtgccgtaaagcactaaatcggaaccctaaagggagcccccgatttagagcttgacggggaaagccggcgaacgtggcgagaaaggaagggaagaaagcgaaaggagcgggcgctagggcgctggcaagtgtagcggtcacgctgcgcgtaaccaccacacccgccgcgcttaatgcgccgctacagggcgcgtcgcgccattcgccattcaggctgcgcaactgttgggaagggcgatcggtgcgggcctcttcgctattacgccagctggcgaaagggggatgtgctgcaaggcgattaagttgggtaacgccagggttttcccagtcacgacgttgtaaaacgacggccagtgcatagaccagccgcgtaacctggcaaaatcggttacggttgagtaataaatggatgccctgcgtaagcgggtgtgggcggacaataaagtcttaaactgaacaaaatagatctaaactatgacaataaagtcttaaactagacagaatagttgtaaactgaaatcagtccagttatgctgtgaaaaagcatactggacttttgttatggctaaagcaaactcttcattttctgaagtgcaaattgcccgtcgtattaaagaggggcgtggccaagggcatggtaaagactatattcgcggcgttgtgacaatttaccgaacaactccgcggccgggaagccgatctcggcttgaacgaattgttaggtggcggtacttgggtcgatatcaaagtgcatcacttcttcccgtatgcccaactttgtatagagagccactgcgggatcgtcaccgtaatctgcttgcacgtagatcacataagcaccaagcgcgttggcctcatgcttgaggagattgatgagcgcggtggcaatgccctgcctccggtgctcgccggagactgcgagatcatagatatagatctcactacgcggctgctcaaacttgggcagaacgtaagccgcgagagcgccaacaaccgcttcttggtcgaaggcagcaagcgcgatgaatgtcttactacggagcaagttcccgaggtaatcggagtccggctgatgttgggagtaggtggctacgtctccgaactcacgaccgaaaagatcaagagcagcccgcatggatttgacttggtcagggccgagcctacatgtgcgaatgatgcccatacttgagccacctaactttgttttagggcgactgccctgctgcgtaacatcgttgctgctgcgtaacatcgttgctgctccataacatcaaacatcgacccacggcgtaacgcgcttgctgcttggatgcccgaggcatagactgtacaaaaaaacagtcataacaagccatgaaaaccgccactgcgccgttaccaccgctgcgttcggtcaaggttctggaccagttgcgtgagcgcatacgctacttgcattacagtttacgaaccgaacaggcttatgtcaactgggttcgtgccttcatccgtttccacggtgtgcgtcacccggcaaccttgggcagcagcgaagtcgaggcatttctgtcctggctggcgaacgagcgcaaggtttcggtctccacgcatcgtcaggcattggcggccttgctgttcttctacggcaaggtgctgtgcacggatctgcccttgcttcaggagatcggtagacctcggccgtcgcggcgcttgccggtggtgctgaccccggatgaagtggttcgcatcctcggttttctggaaggcgagcatcgtttgttcgcccaggactctagctatagttctagtggttggctacagctttgtttgtactatcaacaggttgaactgctgatcaacagatcctctacgcggccgcggtaccataacttcgtatagcatacattatacgaagttatctggtttaaacgtacccgtagtggctatggcagggcttgccgccccgacgttggctgcgagccctgggccttcacccgaacttgggggttggggtggggaaaaggaagaaacgcgggcgtattggtcccaatggggtctcggtggggtatcgacagagtgccagccctgggaccgaaccccgcgtttatgaacaaacgacccaacacccgtgcgttttattctgtctttttattgccgtcatagcgcgggttccttccggtattgtctccttccgtgtttcagttagcctcccccatctcccggtaccgcatgctatgcatcagctgctagcaccatggctcgagatcccgggtgatcaagtcttcgtcgagtgattgtaaataaaatgtaatttacagtatagtattttaattaatatacaaatgatttgataataattcttatttaactataatatattgtgttgggttgaattaaaggtccgtatactagtatcgattcgcgacctactccggaatattaatagatcatggagataattaaaatgataaccatctcgcaaataaataagtattttactgttttcgtaacagttttgtaataaaaaaacctataaatattccggattattcataccgtcccaccatcgggcgcggatccgccaccatggaaaactggtccgctctggaactgctgcccaaggtcggaatccctaccgacttcctgacccacgtcaagacctccgctggcgaggaaatgttcgaggctctgaggatctactacggcgacgaccccgagcgttacaacatccacttcgaggctatcttcggcaccttctgcaaccgtctggaatgggtgtacttcctgacttccggcctggctgctgctgctcacgctatcaagttccacgacctgaacaagctgaccaccggcaagatgctgttccacgtgcaagtgccccgtgtggcttccggtgctggcctgcctacctcccgtcagaccaccatcatggtcaccaagtactccgagaagtcccccatcaccatccctttcgagctgtccgctgcttgcctgacttacctgcgtgaaaccttcgagggcaccatcctggacaagatcctgaacgtcgaggctatgcacaccgtgctgcgtgctctgaagaacaccgctgacgctatggaacgtggcctgatccacagcttcctccagaccctgctgaggaaggctcccccctacttcgtggtgcagaccctggtcgagaacgctaccctggctcgtcaggctctgaaccgtatccagcgctccaacatcctgcagtccttcaaggctaagatgctggctaccctgttcctgctgaaccgtacccgtgaccgtgactacgtgctgaagttcctgacccgtctggctgaggctgctaccgactccatcctcgacaaccctactacctacaccacctcctccggtgctaagatctccggtgtcatggtgtccaccgctaacgtgatgcagatcatcatgtccctgctgtcctcccacatcactaaggaaaccgtgtccgctcccgctacctacggcaacttcgtgctgtcccccgagaacgctgtgaccgctatctcctaccactctatcctggctgacttcaactcctacaaggctcacctgacctccggccagccccacctccccaacgactccctgagccaggctggtgctcactccctgacccccctgtccatggacgtgatccgtctgggcgaaaagaccgtgatcatggaaaacctgcgtcgcgtgtacaagaacaccgacaccaaggaccccctggaacgtaacgtggacctgaccttcttcttccccgtgggcctgtacctgcccgaggaccgtggttacaccaccgtcgagtccaaggtcaagctgaacgacaccgtgcgtaacgctctgcccaccaccgcttacctgctgaacagggaccgtgctgtgcaaaagatcgacttcgtggacgctctcaagaccctgtgccaccccgtgctgcacgagcctgctccatgcctgcaggctttcaccgagcgtggtcccccatccgagcccgctatgcagcgtctgctggaatgccgtttccagcaagagcccatgggtggtgctgctcgtcgtatcccccacttctaccgtgtgcgccgcgaggtgccccgtaccgtgaacgagatgaagcaggacttcgtggtcaccgacttctacaaggttggaaacatcaccctgtacaccgagctgcaccctttcttcgacttcacccactgccaagagaactccgagactgtggctctgtgcaccccccgtatcgtgatcggcaacctgcccgacggcctggctcccggtcccttccacgagctgaggacctgggagatcatggaacacatgcgcctgcgtcccccacccgactacgaggaaaccctgcgtctgttcaagaccaccgtgacctcccccaactaccccgagctgtgctacctggtggacgtgctggtgcacggcaacgctgacgctttcctgctgatccgcgctttcatcgctcgttgcatcgtgaacatgttccacacccgtcagctgctggtgttcgctcactcctacgctctggtcaccctgatcgctgagcacctggctgacggtgctctgcccccccagctcctgttccactaccgtaacctggtggctgtgctgcgcctggtcacccgtatctccgctctgcccggcctgaacaacggccagctggctgaggaacccctgtccgcttacgtgaacgctctgcacgaccacaggctgtggccccccttcgtgacccacctccctcgtaacatggaaggtgtccaggtggtggctgatcgtcagcccctgaaccccgctaacatcgaggctcgtcaccacggtgtctccgacgtgccccgtctgggtgctatggacgctgacgagcccctgttcgtggacgactaccgtgctaccgacgacgagtggaccctgcaaaaggtgttctacctgtgcctgatccccgctatgaccaacaaccgtgcttgcggcctgggcctgaacctcaagactctgctggtggacctgttctaccgtcccgccttcctgctcatgcccgctgctaccgctgtgtccacctccggcaccacctccaaggaatccacctctggtgtcacccccgaggactccgtggctgctcagcgtcaggctgtgggcgagatgctgaccgagctggtcgaggacgtggccaccgacgctcacacccctctgctgcaggcttgccgcgagctgttcctggctgtgcagttcgtgggcgagcacgtgaaggtgctggaagtgcgtgctcccctggaccacgctcagaggcagggactgcccgacttcatctcccgtcagcatgtgctgtacaacggttgctgcgtcgtgaccgctcctaagaccctgatcgagtactccctgcccgtgcccttccaccgtttctactccaaccccaccatctgcgctgctctgtccgacgacatcaagcgttacgtgaccgagttcccccactaccatagacacgatggtggtttccccctgcccaccgctttcgctcacgagtaccacaactggctgcgtagccccttctcccgttactccgctacctgccccaacgtgctgcactccgtgatgaccctggctgctatgctgtacaagatctcccccgtgtccctggtgctgcagaccaaggctcacatccaccccggtttcgctctgaccgctgtgcgtaccgacaccttcgaggtggacatgctgctgtactccggcaagtcctgcacctccgtcatcatcaacaaccccatcgtgaccaaggaagagagggacatctccaccacctaccacgtgacccagaacatcaacaccgtggacatgggcctgggttacacctccaacacttgcgtggcctacgtgaaccgcgtccgcaccgacatgggtgtccgtgtgcaggacctgttccgtgtgttccccatgaacgtgtaccgccacgatgaggtggaccgttggatcaggcacgctgctggcgtcgagcgtccccagctgctggacaccgagactatctccatgctgaccttcggttccatgtccgagcgcaacgctgctgctaccgtgcacggccagaaggctgtctgcgagctgatcctgacccctgtgactatggacgtgaactacttcaagatcaccaacaaccctcgtggtcgtgcttcctgcatgctgggcgtggacccctacgacaccgaggctgccaccaaggctatctacgaccaccgcgaggctgacgctcagaccttcgctgctacccacaacccatgggcttcccaggctggttgcctgtccgacgtcctgtacaacacccgtcaccgcgagcgtctgggctacaactccaagttctactccccctgcgctcagtacttcaacaccgaggaaatcatcgctgccaacaagaccctcttcaagaccatcgacgagtacctgctgcgcgctaaggactgcatccgtggcgacaccgacactcagtacgtgtgcgtcgagggaaccgagcagctgatcgagaacccttgccgtctgacccaagaggctctgcccatcctgtccaccaccaccctggctctgatggaaactaagctgaagggtggcgctggtgctttcgctacctccgagactcacttcggcaactacgtcgtgggagagatcatccccctgcagcagtccatgctgttcaacagctaagagctcaagcttgtcgagaagtactagaggatcataatcagccataccacatttgtagaggttttacttgctttaaaaaacctcccacacctccccctgaacctgaaacataaaatgaatgcaattgttgttgttaacttgtttattgcagcttataatggttacaaataaagcaatagcatcacaaatttcacaaataaagcatttttttcactgcattctagttgtggtttgtccaaactcatcaatgtatcttatcatgtctggatctgatcactgcttgagcctagaagatccggctgctaacaaagcccgaaaggaagctgagttggctgctgtggctagctttgtttaactttaagaaggagatacatctagaaatattaatagatcatggagataattaaaatgataaccatctcgcaaataaataagtattttactgttttcgtaacagttttgtaataaaaaaacctataaatattccggattattcataccgtcccaccatcgggcgcggatccgccaccatggctgctatggaagctaacatcttctgcaccttcgaccacaagctgtctatcgctgacgtgggcaagctgaccaagctggtggctgctgtggtgcccatcccccagcgtctgcacctgatcaagcactaccagctgggcctgcaccagttcgtggaccacacccgtggttacgtgcgtctgcgtggcctgctgcgtaacatgaccctgaccctgatgcgtcgtgtcgagggcaaccagatcctgctgcacgtgcccacccacggcctgctgtacaccgtgctgaacaccggtcccgtgacctgggagaagggcgacgctctgtgcgtgctgccccccctgttccacggtcccctggctcgtgaaaacctgttgaccctgggccagtgggagctggtgctgccctggatcgtgcccatgcccctggctctggaaatcaaccagcgcctgctgatcatgggcctgttctccctggaccgttcctacgaagaagtgaaggctgctgtccagcagctgcagaccatcaccttccgtgacgctaccttcaccatccccgaccccgtgatcgaccagcacctcctgatcgacatgaagaccgcttgcctgtccatgtccatggtggctaacctggcttccgagctgaccatgacctacgtccgcaagctggctttggaggactcttccatgctgctggtcaagtgccaagagctgctgatgcgtctggaccgcgagcgttccgtgggcgagcctcgtactcccgctcgtcctcagcacgtgtcccccgacgacgagatcgctcgtctgtccgctctgttcgtgatgctgcgtcagctggacgacctgatccgcgagcaggtcgtgttcaccgtgtgcgacgtgagcccagacaacaagtccgctacctgcatcttcaagggctaaggcgcgccaagcttgtcgagaagtactagaggatcataatcagccataccacatttgtagaggttttacttgctttaaaaaacctcccacacctccccctgaacctgaaacataaaatgaatgcaattgttgttgttaacttgtttattgcagcttataatggttacaaataaagcaatagcatcacaaatttcacaaataaagcatttttttcactgcattctagttgtggtttgtccaaactcatcaatgtatcttatcatgtctggatctgatcactgcttgagcctagaagatccggctgctaacaaagcccgaaaggaagctgagttggctgctgggtgcctaatgagtgagctaactcacattaattgcccggaatattaatagatcatggagataattaaaatgataaccatctcgcaaataaataagtattttactgttttcgtaacagttttgtaataaaaaaacctataaatattccggattattcataccgtcccaccatcgggcgcggatcccggtccgaagcgcgcggaattcaaaggcctacgtcgacgccaccatgtccaacaccgctcccggtcccaccgtggctaacaagcgtgacgagaagcaccgtcacgtggtcaacgtggtgctcgagctgcccaccgagatctccgaggctacccaccccgtgctggctaccatgctgtccaagtacacccgtatgtcctccctgttcaacgacaagtgcgctttcaagctggacctgctgcgtatggtggctgtgtcccgtacccgtcgctaaaagcttgtcgagaagtactagaggatcataatcagccataccacatttgtagaggttttacttgctttaaaaaacctcccacacctccccctgaacctgaaacataaaatgaatgcaattgttgttgttaacttgtttattgcagcttataatggttacaaataaagcaatagcatcacaaatttcacaaataaagcatttttttcactgcattctagttgtggtttgtccaaactcatcaatgtatcttatcatgtctggatctgatcactgcttgagcctagaagatccggctgctaacaaagcccgaaaggaagctgagttggctgctgggtgcctaatgagtgagctaactcacattaattgcccggaatattaatagatcatggagataattaaaatgataaccatctcgcaaataaataagtattttactgttttcgtaacagttttgtaataaaaaaacctataaatattccggattattcataccgtcccaccatcgggcgcggatcccggtccgaagcgcgcggaattcaaaggcctacgtcgacgccaccatggaatcccgtggtcgtcgttgccccgagatgatctccgtgctgggtcccatctccggtcacgtcctgaaggctgtgttctcccgtggcgacacccccgtgctgccccacgaaactcgtctgctgcagaccggtatccacgtgcgtgtgtcccagccctccctgatcctggtgtcccagtacacccccgactccaccccttgccaccgcggagacaaccagctgcaggtccagcacacctacttcaccggttccgaggtcgagaacgtgtccgtgaacgtgcacaaccccaccggtcgttccatctgcccctcccaagagcccatgtccatctacgtgtacgctctgcccctgaagatgctgaacatcccctccatcaacgtgcaccactacccctccgctgctgagcgcaagcaccgtcacctccccgtggctgacgctgtgatccacgcttccggcaagcagatgtggcaggctcgtctgaccgtgtccggcctggcttggacccgtcagcagaaccagtggaaggaacccgacgtgtactacacctccgctttcgtgttccccaccaaggacgtggccctgcgtcacgtcgtgtgcgctcacgaactcgtgtgctccatggaaaacacccgtgctaccaagatgcaagtgatcggcgaccagtacgtgaaggtgtacctggaatccttctgcgaggacgtgccctccggcaagctgttcatgcacgtgaccctgggttccgacgtggaagaggacctgaccatgacccgtaacccccagcccttcatgcgtccccacgagcgtaacggtttcaccgtgctgtgccccaagaacatgatcatcaagcccggcaagatctcccacatcatgctggacgtggccttcacctcccacgagcacttcggcctgctgtgccctaagtccatccccggcctgtccatctccggcaacctgctgatgaacggccagcagatcttcctggaagtgcaggctatccgtgaaaccgtcgagctgcgtcagtacgaccctgtggctgctctgttcttcttcgacatcgacctgctgctgcagcgtggtccccagtactccgagcaccccaccttcaccagccagtaccgtatccagggcaagctggaataccgtcacacctgggaccgtcacgacgagggtgctgctcagggcgacgacgacgtgtggacctccggttccgactccgacgaggaactggtcaccaccgagcgcaagaccccccgtgtgaccggtggtggtgctatggctggtgcttccacctccgctggtcgcaagcgcaagtccgcttcctccgctaccgcttgcaccgctggtgtcatgacccgtggtcgcctgaaggctgagtccaccgtggctcccgaagaggacactgacgaggactccgacaacgagatccacaaccccgctgtgttcacctggcccccctggcaggctggtatcctggctcgtaacctggtgcccatggtggctaccgtgcagggccagaacctgaagtaccaagagttcttctgggacgccaacgacatctaccgtatcttcgctgagctggaaggcgtgtggcagcccgctgctcagcccaagcgtcgtcgtcaccgtcaggacgctctgcctggtccctgtatcgcttccacccccaagaagcaccgcggctaaaagcttgtcgagaagtactagaggatcataatcagccataccacatttgtagaggttttacttgctttaaaaaacctcccacacctccccctgaacctgaaacataaaatgaatgcaattgttgttgttaacttgtttattgcagcttataatggttacaaataaagcaatagcatcacaaatttcacaaataaagcatttttttcactgcattctagttgtggtttgtccaaactcatcaatgtatcttatcatgtctggatctgatcactgcttgagcctagaagatccggctgctaacaaagcccgaaaggaagctgggaatattaatagatcaatggagataattaaaatgataaccatctcgcaaataaataagtattttactgttttcgtaacagttttgtaataaaaaaacctataaatattccggattattcataccgtcccaccatcgggcgcggatccgccaccatggccccctcccacgtggacaaggtgaacacccgcacctggtccgcctccatcgtgttcatggtgctgaccttcgtgaacgtgtccgtgcacctggtgctgtccaacttcccccacctgggctacccctgcgtgtactaccacgtggtggacttcgagcgcctgaacatgtccgcctacaacgtgatgcacctgcacacccccatgctgttcctggactccgtgcagctggtgtgctacgccgtgttcatgcagctggtgttcctggccgtgaccatctactacctggtgtgctggatcaagatctccatgcgcaaggacaagggcatgtccctgaaccagtccacccgcgacatctcctacatgggcgactccctgaccgccttcctgttcatcctgtccatggacaccttccagctgttcaccctgaccatgtccttccgcctgccctccatgatcgccttcatggccgccgtgcacttcttctgcctgaccatcttcaacgtgtccatggtgacccagtaccgctcctacaagcgctccctgttcttcttctcccgcctgcaccccaagctgaagggcaccgtgcagttccgcaccctgatcgtgaacctggtggaggtggccctgggcttcaacaccaccgtggtggccatggccctgtgctacggcttcggcaacaacttcttcgtgcgcaccggccacatggtgctggccgtgttcgtggtgtacgccatcatctccatcatctacttcctgctgatcgaggccgtgttcttccagtacgtgaaggtgcagttcggctaccacctgggcgccttcttcggcctgtgcggcctgatctaccccatcgtgcagtacgacaccttcctgtccaacgagtaccgcaccggcatctcctggtccttcggcatgctgttcttcatctgggccatgttcaccacctgccgcgccgtgcgctacttccgcggccgcggctccggctccgtgaagtaccaggccctggccaccgcctccggcgaggaggtggccgccctgtcccaccacgactccctggagtcccgccgcctgcgcgaggaggaggacgacgacgacgacgaggacttcgaggacgcctaagagctcaagcttgtcgagaagtactagaggatcataatcagccataccacatttgtagaggttttacttgctttaaaaaacctcccacacctccccctgaacctgaaacataaaatgaatgcaattgttgttgttaacttgtttattgcagcttataatggttacaaataaagcaatagcatcacaaatttcacaaataaagcatttttttcactgcattctagttgtggtttgtccaaactcatcaatgtatcttatcatgtctggatctgatcactgcttgagcctagaagatccggctgctaacaaagcccgaaaggaagctgagttggctgctgccaccgctgagcaataactatcataacccctaggagatccgaaccagataagtgaaatctagttccaaactattttgtcatttttaattttcgtattagcttacgacgctacacccagttcccatctattttgtcactcttccctaaataatccttaaaaactccatttccacccctcccagttcccaactattttgtccgcccaca

SEQ ID NO: 82 - DNA, 13993 bp, Artificial Sequence
  Synthetic construct
ttgttccagtttggaacaagagtccactattaaagaacgtggactccaacgtcaaagggcgaaaaaccgtctatcagggcgatggcccactacgtgaaccatcaccctaatcaagttttttggggtcgaggtgccgtaaagcactaaatcggaaccctaaagggagcccccgatttagagcttgacggggaaagccggcgaacgtggcgagaaaggaagggaagaaagcgaaaggagcgggcgctagggcgctggcaagtgtagcggtcacgctgcgcgtaaccaccacacccgccgcgcttaatgcgccgctacagggcgcgtcgcgccattcgccattcaggctgcgcaactgttgggaagggcgatcggtgcgggcctcttcgctattacgccagctggcgaaagggggatgtgctgcaaggcgattaagttgggtaacgccagggttttcccagtcacgacgttgtaaaacgacggccagtgcatagaccagccgcgtaacctggcaaaatcggttacggttgagtaataaatggatgccctgcgtaagcgggtgtgggcggacaataaagtcttaaactgaacaaaatagatctaaactatgacaataaagtcttaaactagacagaatagttgtaaactgaaatcagtccagttatgctgtgaaaaagcatactggacttttgttatggctaaagcaaactcttcattttctgaagtgcaaattgcccgtcgtattaaagaggggcgtggccaagggcatggtaaagactatattcgcggcgttgtgacaatttaccgaacaactccgcggccgggaagccgatctcggcttgaacgaattgttaggtggcggtacttgggtcgatatcaaagtgcatcacttcttcccgtatgcccaactttgtatagagagccactgcgggatcgtcaccgtaatctgcttgcacgtagatcacataagcaccaagcgcgttggcctcatgcttgaggagattgatgagcgcggtggcaatgccctgcctccggtgctcgccggagactgcgagatcatagatatagatctcactacgcggctgctcaaacttgggcagaacgtaagccgcgagagcgccaacaaccgcttcttggtcgaaggcagcaagcgcgatgaatgtcttactacggagcaagttcccgaggtaatcggagtccggctgatgttgggagtaggtggctacgtctccgaactcacgaccgaaaagatcaagagcagcccgcatggatttgacttggtcagggccgagcctacatgtgcgaatgatgcccatacttgagccacctaactttgttttagggcgactgccctgctgcgtaacatcgttgctgctgcgtaacatcgttgctgctccataacatcaaacatcgacccacggcgtaacgcgcttgctgcttggatgcccgaggcatagactgtacaaaaaaacagtcataacaagccatgaaaaccgccactgcgccgttaccaccgctgcgttcggtcaaggttctggaccagttgcgtgagcgcatacgctacttgcattacagtttacgaaccgaacaggcttatgtcaactgggttcgtgccttcatccgtttccacggtgtgcgtcacccggcaaccttgggcagcagcgaagtcgaggcatttctgtcctggctggcgaacgagcgcaaggtttcggtctccacgcatcgtcaggcattggcggccttgctgttcttctacggcaaggtgctgtgcacggatctgcccttgcttcaggagatcggtagacctcggccgtcgcggcgcttgccggtggtgctgaccccggatgaagtggttcgcatcctcggttttctggaaggcgagcatcgtttgttcgcccaggactctagctatagttctagtggttggctacagctttgtttgtactatcaacaggttgaactgctgatcaacagatcctctacgcggccgcggtaccataacttcgtatagcatacattatacgaagttatctggtttaaacgtacccgtagtggctatggcagggcttgccgccccgacgttggctgcgagccctgggccttcacccgaacttgggggttggggtggggaaaaggaagaaacgcgggcgtattggtcccaatggggtctcggtggggtatcgacagagtgccagccctgggaccgaaccccgcgtttatgaacaaacgacccaacacccgtgcgttttattctgtctttttattgccgtcatagcgcgggttccttccggtattgtctccttccgtgtttcagttagcctcccccatctcccggtaccgcatgctatgcatcagctgctagcaccatggctcgagatcccgggtgatcaagtcttcgtcgagtgattgtaaataaaatgtaatttacagtatagtattttaattaatatacaaatgatttgataataattcttatttaactataatatattgtgttgggttgaattaaaggtccgtatactagtatcgattcgcgacctactccggaatattaatagatcatggagataattaaaatgataaccatctcgcaaataaataagtattttactgttttcgtaacagttttgtaataaaaaaacctataaatattccggattattcataccgtcccaccatcgggcgcggatccgccaccatggaaaactggtccgctctggaactgctgcccaaggtcggaatccctaccgacttcctgacccacgtcaagacctccgctggcgaggaaatgttcgaggctctgaggatctactacggcgacgaccccgagcgttacaacatccacttcgaggctatcttcggcaccttctgcaaccgtctggaatgggtgtacttcctgacttccggcctggctgctgctgctcacgctatcaagttccacgacctgaacaagctgaccaccggcaagatgctgttccacgtgcaagtgccccgtgtggcttccggtgctggcctgcctacctcccgtcagaccaccatcatggtcaccaagtactccgagaagtcccccatcaccatccctttcgagctgtccgctgcttgcctgacttacctgcgtgaaaccttcgagggcaccatcctggacaagatcctgaacgtcgaggctatgcacaccgtgctgcgtgctctgaagaacaccgctgacgctatggaacgtggcctgatccacagcttcctccagaccctgctgaggaaggctcccccctacttcgtggtgcagaccctggtcgagaacgctaccctggctcgtcaggctctgaaccgtatccagcgctccaacatcctgcagtccttcaaggctaagatgctggctaccctgttcctgctgaaccgtacccgtgaccgtgactacgtgctgaagttcctgacccgtctggctgaggctgctaccgactccatcctcgacaaccctactacctacaccacctcctccggtgctaagatctccggtgtcatggtgtccaccgctaacgtgatgcagatcatcatgtccctgctgtcctcccacatcactaaggaaaccgtgtccgctcccgctacctacggcaacttcgtgctgtcccccgagaacgctgtgaccgctatctcctaccactctatcctggctgacttcaactcctacaaggctcacctgacctccggccagccccacctccccaacgactccctgagccaggctggtgctcactccctgacccccctgtccatggacgtgatccgtctgggcgaaaagaccgtgatcatggaaaacctgcgtcgcgtgtacaagaacaccgacaccaaggaccccctggaacgtaacgtggacctgaccttcttcttccccgtgggcctgtacctgcccgaggaccgtggttacaccaccgtcgagtccaaggtcaagctgaacgacaccgtgcgtaacgctctgcccaccaccgcttacctgctgaacagggaccgtgctgtgcaaaagatcgacttcgtggacgctctcaagaccctgtgccaccccgtgctgcacgagcctgctccatgcctgcaggctttcaccgagcgtggtcccccatccgagcccgctatgcagcgtctgctggaatgccgtttccagcaagagcccatgggtggtgctgctcgtcgtatcccccacttctaccgtgtgcgccgcgaggtgccccgtaccgtgaacgagatgaagcaggacttcgtggtcaccgacttctacaaggttggaaacatcaccctgtacaccgagctgcaccctttcttcgacttcacccactgccaagagaactccgagactgtggctctgtgcaccccccgtatcgtgatcggcaacctgcccgacggcctggctcccggtcccttccacgagctgaggacctgggagatcatggaacacatgcgcctgcgtcccccacccgactacgaggaaaccctgcgtctgttcaagaccaccgtgacctcccccaactaccccgagctgtgctacctggtggacgtgctggtgcacggcaacgctgacgctttcctgctgatccgcgctttcatcgctcgttgcatcgtgaacatgttccacacccgtcagctgctggtgttcgctcactcctacgctctggtcaccctgatcgctgagcacctggctgacggtgctctgcccccccagctcctgttccactaccgtaacctggtggctgtgctgcgcctggtcacccgtatctccgctctgcccggcctgaacaacggccagctggctgaggaacccctgtccgcttacgtgaacgctctgcacgaccacaggctgtggccccccttcgtgacccacctccctcgtaacatggaaggtgtccaggtggtggctgatcgtcagcccctgaaccccgctaacatcgaggctcgtcaccacggtgtctccgacgtgccccgtctgggtgctatggacgctgacgagcccctgttcgtggacgactaccgtgctaccgacgacgagtggaccctgcaaaaggtgttctacctgtgcctgatccccgctatgaccaacaaccgtgcttgcggcctgggcctgaacctcaagactctgctggtggacctgttctaccgtcccgccttcctgctcatgcccgctgctaccgctgtgtccacctccggcaccacctccaaggaatccacctctggtgtcacccccgaggactccgtggctgctcagcgtcaggctgtgggcgagatgctgaccgagctggtcgaggacgtggccaccgacgctcacacccctctgctgcaggcttgccgcgagctgttcctggctgtgcagttcgtgggcgagcacgtgaaggtgctggaagtgcgtgctcccctggaccacgctcagaggcagggactgcccgacttcatctcccgtcagcatgtgctgtacaacggttgctgcgtcgtgaccgctcctaagaccctgatcgagtactccctgcccgtgcccttccaccgtttctactccaaccccaccatctgcgctgctctgtccgacgacatcaagcgttacgtgaccgagttcccccactaccatagacacgatggtggtttccccctgcccaccgctttcgctcacgagtaccacaactggctgcgtagccccttctcccgttactccgctacctgccccaacgtgctgcactccgtgatgaccctggctgctatgctgtacaagatctcccccgtgtccctggtgctgcagaccaaggctcacatccaccccggtttcgctctgaccgctgtgcgtaccgacaccttcgaggtggacatgctgctgtactccggcaagtcctgcacctccgtcatcatcaacaaccccatcgtgaccaaggaagagagggacatctccaccacctaccacgtgacccagaacatcaacaccgtggacatgggcctgggttacacctccaacacttgcgtggcctacgtgaaccgcgtccgcaccgacatgggtgtccgtgtgcaggacctgttccgtgtgttccccatgaacgtgtaccgccacgatgaggtggaccgttggatcaggcacgctgctggcgtcgagcgtccccagctgctggacaccgagactatctccatgctgaccttcggttccatgtccgagcgcaacgctgctgctaccgtgcacggccagaaggctgtctgcgagctgatcctgacccctgtgactatggacgtgaactacttcaagatcaccaacaaccctcgtggtcgtgcttcctgcatgctgggcgtggacccctacgacaccgaggctgccaccaaggctatctacgaccaccgcgaggctgacgctcagaccttcgctgctacccacaacccatgggcttcccaggctggttgcctgtccgacgtcctgtacaacacccgtcaccgcgagcgtctgggctacaactccaagttctactccccctgcgctcagtacttcaacaccgaggaaatcatcgctgccaacaagaccctcttcaagaccatcgacgagtacctgctgcgcgctaaggactgcatccgtggcgacaccgacactcagtacgtgtgcgtcgagggaaccgagcagctgatcgagaacccttgccgtctgacccaagaggctctgcccatcctgtccaccaccaccctggctctgatggaaactaagctgaagggtggcgctggtgctttcgctacctccgagactcacttcggcaactacgtcgtgggagagatcatccccctgcagcagtccatgctgttcaacagctaagagctcaagcttgtcgagaagtactagaggatcataatcagccataccacatttgtagaggttttacttgctttaaaaaacctcccacacctccccctgaacctgaaacataaaatgaatgcaattgttgttgttaacttgtttattgcagcttataatggttacaaataaagcaatagcatcacaaatttcacaaataaagcatttttttcactgcattctagttgtggtttgtccaaactcatcaatgtatcttatcatgtctggatctgatcactgcttgagcctagaagatccggctgctaacaaagcccgaaaggaagctgagttggctgctgtggctagctttgtttaactttaagaaggagatacatctagaaatattaatagatcatggagataattaaaatgataaccatctcgcaaataaataagtattttactgttttcgtaacagttttgtaataaaaaaacctataaatattccggattattcataccgtcccaccatcgggcgcggatccgccaccatggctgctatggaagctaacatcttctgcaccttcgaccacaagctgtctatcgctgacgtgggcaagctgaccaagctggtggctgctgtggtgcccatcccccagcgtctgcacctgatcaagcactaccagctgggcctgcaccagttcgtggaccacacccgtggttacgtgcgtctgcgtggcctgctgcgtaacatgaccctgaccctgatgcgtcgtgtcgagggcaaccagatcctgctgcacgtgcccacccacggcctgctgtacaccgtgctgaacaccggtcccgtgacctgggagaagggcgacgctctgtgcgtgctgccccccctgttccacggtcccctggctcgtgaaaacctgttgaccctgggccagtgggagctggtgctgccctggatcgtgcccatgcccctggctctggaaatcaaccagcgcctgctgatcatgggcctgttctccctggaccgttcctacgaagaagtgaaggctgctgtccagcagctgcagaccatcaccttccgtgacgctaccttcaccatccccgaccccgtgatcgaccagcacctcctgatcgacatgaagaccgcttgcctgtccatgtccatggtggctaacctggcttccgagctgaccatgacctacgtccgcaagctggctttggaggactcttccatgctgctggtcaagtgccaagagctgctgatgcgtctggaccgcgagcgttccgtgggcgagcctcgtactcccgctcgtcctcagcacgtgtcccccgacgacgagatcgctcgtctgtccgctctgttcgtgatgctgcgtcagctggacgacctgatccgcgagcaggtcgtgttcaccgtgtgcgacgtgagcccagacaacaagtccgctacctgcatcttcaagggctaaggcgcgccaagcttgtcgagaagtactagaggatcataatcagccataccacatttgtagaggttttacttgctttaaaaaacctcccacacctccccctgaacctgaaacataaaatgaatgcaattgttgttgttaacttgtttattgcagcttataatggttacaaataaagcaatagcatcacaaatttcacaaataaagcatttttttcactgcattctagttgtggtttgtccaaactcatcaatgtatcttatcatgtctggatctgatcactgcttgagcctagaagatccggctgctaacaaagcccgaaaggaagctgagttggctgctgggtgcctaatgagtgagctaactcacattaattgcccggaatattaatagatcatggagataattaaaatgataaccatctcgcaaataaataagtattttactgttttcgtaacagttttgtaataaaaaaacctataaatattccggattattcataccgtcccaccatcgggcgcggatcccggtccgaagcgcgcggaattcaaaggcctacgtcgacgccaccatgtccaacaccgctcccggtcccaccgtggctaacaagcgtgacgagaagcaccgtcacgtggtcaacgtggtgctcgagctgcccaccgagatctccgaggctacccaccccgtgctggctaccatgctgtccaagtacacccgtatgtcctccctgttcaacgacaagtgcgctttcaagctggacctgctgcgtatggtggctgtgtcccgtacccgtcgctaaaagcttgtcgagaagtactagaggatcataatcagccataccacatttgtagaggttttacttgctttaaaaaacctcccacacctccccctgaacctgaaacataaaatgaatgcaattgttgttgttaacttgtttattgcagcttataatggttacaaataaagcaatagcatcacaaatttcacaaataaagcatttttttcactgcattctagttgtggtttgtccaaactcatcaatgtatcttatcatgtctggatctgatcactgcttgagcctagaagatccggctgctaacaaagcccgaaaggaagctgagttggctgctgggtgcctaatgagtgagctaactcacattaattgcccggaatattaatagatcatggagataattaaaatgataaccatctcgcaaataaataagtattttactgttttcgtaacagttttgtaataaaaaaacctataaatattccggattattcataccgtcccaccatcgggcgcggatcccggtccgaagcgcgcggaattcaaaggcctacgtcgacgccaccatggaatcccgtggtcgtcgttgccccgagatgatctccgtgctgggtcccatctccggtcacgtcctgaaggctgtgttctcccgtggcgacacccccgtgctgccccacgaaactcgtctgctgcagaccggtatccacgtgcgtgtgtcccagccctccctgatcctggtgtcccagtacacccccgactccaccccttgccaccgcggagacaaccagctgcaggtccagcacacctacttcaccggttccgaggtcgagaacgtgtccgtgaacgtgcacaaccccaccggtcgttccatctgcccctcccaagagcccatgtccatctacgtgtacgctctgcccctgaagatgctgaacatcccctccatcaacgtgcaccactacccctccgctgctgagcgcaagcaccgtcacctccccgtggctgacgctgtgatccacgcttccggcaagcagatgtggcaggctcgtctgaccgtgtccggcctggcttggacccgtcagcagaaccagtggaaggaacccgacgtgtactacacctccgctttcgtgttccccaccaaggacgtggccctgcgtcacgtcgtgtgcgctcacgaactcgtgtgctccatggaaaacacccgtgctaccaagatgcaagtgatcggcgaccagtacgtgaaggtgtacctggaatccttctgcgaggacgtgccctccggcaagctgttcatgcacgtgaccctgggttccgacgtggaagaggacctgaccatgacccgtaacccccagcccttcatgcgtccccacgagcgtaacggtttcaccgtgctgtgccccaagaacatgatcatcaagcccggcaagatctcccacatcatgctggacgtggccttcacctcccacgagcacttcggcctgctgtgccctaagtccatccccggcctgtccatctccggcaacctgctgatgaacggccagcagatcttcctggaagtgcaggctatccgtgaaaccgtcgagctgcgtcagtacgaccctgtggctgctctgttcttcttcgacatcgacctgctgctgcagcgtggtccccagtactccgagcaccccaccttcaccagccagtaccgtatccagggcaagctggaataccgtcacacctgggaccgtcacgacgagggtgctgctcagggcgacgacgacgtgtggacctccggttccgactccgacgaggaactggtcaccaccgagcgcaagaccccccgtgtgaccggtggtggtgctatggctggtgcttccacctccgctggtcgcaagcgcaagtccgcttcctccgctaccgcttgcaccgctggtgtcatgacccgtggtcgcctgaaggctgagtccaccgtggctcccgaagaggacactgacgaggactccgacaacgagatccacaaccccgctgtgttcacctggcccccctggcaggctggtatcctggctcgtaacctggtgcccatggtggctaccgtgcagggccagaacctgaagtaccaagagttcttctgggacgccaacgacatctaccgtatcttcgctgagctggaaggcgtgtggcagcccgctgctcagcccaagcgtcgtcgtcaccgtcaggacgctctgcctggtccctgtatcgcttccacccccaagaagcaccgcggctcagctgttgaattttgaccttcttaagcttgcgggagacgtcgagtccaaccctgggcccatggccccctcccacgtggacaaggtgaacacccgcacctggtccgcctccatcgtgttcatggtgctgaccttcgtgaacgtgtccgtgcacctggtgctgtccaacttcccccacctgggctacccctgcgtgtactaccacgtggtggacttcgagcgcctgaacatgtccgcctacaacgtgatgcacctgcacacccccatgctgttcctggactccgtgcagctggtgtgctacgccgtgttcatgcagctggtgttcctggccgtgaccatctactacctggtgtgctggatcaagatctccatgcgcaaggacaagggcatgtccctgaaccagtccacccgcgacatctcctacatgggcgactccctgaccgccttcctgttcatcctgtccatggacaccttccagctgttcaccctgaccatgtccttccgcctgccctccatgatcgccttcatggccgccgtgcacttcttctgcctgaccatcttcaacgtgtccatggtgacccagtaccgctcctacaagcgctccctgttcttcttctcccgcctgcaccccaagctgaagggcaccgtgcagttccgcaccctgatcgtgaacctggtggaggtggccctgggcttcaacaccaccgtggtggccatggccctgtgctacggcttcggcaacaacttcttcgtgcgcaccggccacatggtgctggccgtgttcgtggtgtacgccatcatctccatcatctacttcctgctgatcgaggccgtgttcttccagtacgtgaaggtgcagttcggctaccacctgggcgccttcttcggcctgtgcggcctgatctaccccatcgtgcagtacgacaccttcctgtccaacgagtaccgcaccggcatctcctggtccttcggcatgctgttcttcatctgggccatgttcaccacctgccgcgccgtgcgctacttccgcggccgcggctccggctccgtgaagtaccaggccctggccaccgcctccggcgaggaggtggccgccctgtcccaccacgactccctggagtcccgccgcctgcgcgaggaggaggacgacgacgacgacgaggacttcgaggacgcctaagagctcaagcttgtcgagaagtactagaggatcataatcagccataccacatttgtagaggttttacttgctttaaaaaacctcccacacctccccctgaacctgaaacataaaatgaatgcaattgttgttgttaacttgtttattgcagcttataatggttacaaataaagcaatagcatcacaaatttcacaaataaagcatttttttcactgcattctagttgtggtttgtccaaactcatcaatgtatcttatcatgtctggatctgatcactgcttgagcctagaagatccggctgctaacaaagcccgaaaggaagctgagttggctgctgtggctagctttgtttaactttaagaaggagatacatctagaaatattaatagatcatggagataattaaaatgataaccatctcgcaaataaataagtattttactgttttcgtaacagttttgtaataaaaaaacctataaatattccggattattcataccgtcccaccatcgggcgcggatcccggtccgaagcgcgcggaattcaaaggcctacgccaccatggagtggaacacactagtactaggtcttttggttttatcggtagcggcaagttccaaccatacgtcgactgctagcacaccgagtccctctagctctactcacacctcaacgaccgtgaaggcaacgactactgcgacaactagtacaactacggtgacaagtacgacttcatcaacgactagtaccaaacccggttccaccactcacgaccccaatgtgatgagaccacatgctcacaatgatttttacaaggcgcattgtacatcgcatatgtatgaactttctctgtccagctttgcggcctggtggactatgcttaatgctctcattctcatgggagctttttgtatcgtactacgacattgctgtttccagaactttactgcaaccaccaccaaaggctattgataaaagcttgtcgagaagtactagaggatcataatcagccataccacatttgtagaggttttacttgctttaaaaaacctcccacacctccccctgaacctgaaacataaaatgaatgcaattgttgttgttaacttgtttattgcagcttataatggttacaaataaagcaatagcatcacaaatttcacaaataaagcatttttttcactgcattctagttgtggtttgtccaaactcatcaatgtatcttatcatgtctggatctgatcactgcttgagcctagaagatccggctgctaacaaagcccgaaaggaagctgagttggctgctgccaccgctgagcaataactatcataacccctaggagatccgaaccagataagtgaaatctagttccaaactattttgtcatttttaattttcgtattagcttacgacgctacacccagttcccatctattttgtcactcttccctaaataatccttaaaaactccatttccacccctcccagttcccaactattttgtccgcccaca

SEQ ID NO: 83 - DNA, 14813 bp, Artificial Sequence
  Synthetic construct
ttgttccagtttggaacaagagtccactattaaagaacgtggactccaacgtcaaagggcgaaaaaccgtctatcagggcgatggcccactacgtgaaccatcaccctaatcaagttttttggggtcgaggtgccgtaaagcactaaatcggaaccctaaagggagcccccgatttagagcttgacggggaaagccggcgaacgtggcgagaaaggaagggaagaaagcgaaaggagcgggcgctagggcgctggcaagtgtagcggtcacgctgcgcgtaaccaccacacccgccgcgcttaatgcgccgctacagggcgcgtcgcgccattcgccattcaggctgcgcaactgttgggaagggcgatcggtgcgggcctcttcgctattacgccagctggcgaaagggggatgtgctgcaaggcgattaagttgggtaacgccagggttttcccagtcacgacgttgtaaaacgacggccagtgcatagaccagccgcgtaacctggcaaaatcggttacggttgagtaataaatggatgccctgcgtaagcgggtgtgggcggacaataaagtcttaaactgaacaaaatagatctaaactatgacaataaagtcttaaactagacagaatagttgtaaactgaaatcagtccagttatgctgtgaaaaagcatactggacttttgttatggctaaagcaaactcttcattttctgaagtgcaaattgcccgtcgtattaaagaggggcgtggccaagggcatggtaaagactatattcgcggcgttgtgacaatttaccgaacaactccgcggccgggaagccgatctcggcttgaacgaattgttaggtggcggtacttgggtcgatatcaaagtgcatcacttcttcccgtatgcccaactttgtatagagagccactgcgggatcgtcaccgtaatctgcttgcacgtagatcacataagcaccaagcgcgttggcctcatgcttgaggagattgatgagcgcggtggcaatgccctgcctccggtgctcgccggagactgcgagatcatagatatagatctcactacgcggctgctcaaacttgggcagaacgtaagccgcgagagcgccaacaaccgcttcttggtcgaaggcagcaagcgcgatgaatgtcttactacggagcaagttcccgaggtaatcggagtccggctgatgttgggagtaggtggctacgtctccgaactcacgaccgaaaagatcaagagcagcccgcatggatttgacttggtcagggccgagcctacatgtgcgaatgatgcccatacttgagccacctaactttgttttagggcgactgccctgctgcgtaacatcgttgctgctgcgtaacatcgttgctgctccataacatcaaacatcgacccacggcgtaacgcgcttgctgcttggatgcccgaggcatagactgtacaaaaaaacagtcataacaagccatgaaaaccgccactgcgccgttaccaccgctgcgttcggtcaaggttctggaccagttgcgtgagcgcatacgctacttgcattacagtttacgaaccgaacaggcttatgtcaactgggttcgtgccttcatccgtttccacggtgtgcgtcacccggcaaccttgggcagcagcgaagtcgaggcatttctgtcctggctggcgaacgagcgcaaggtttcggtctccacgcatcgtcaggcattggcggccttgctgttcttctacggcaaggtgctgtgcacggatctgcccttgcttcaggagatcggtagacctcggccgtcgcggcgcttgccggtggtgctgaccccggatgaagtggttcgcatcctcggttttctggaaggcgagcatcgtttgttcgcccaggactctagctatagttctagtggttggctacagctttgtttgtactatcaacaggttgaactgctgatcaacagatcctctacgcggccgcggtaccataacttcgtatagcatacattatacgaagttatctggtttaaacgtacccgtagtggctatggcagggcttgccgccccgacgttggctgcgagccctgggccttcacccgaacttgggggttggggtggggaaaaggaagaaacgcgggcgtattggtcccaatggggtctcggtggggtatcgacagagtgccagccctgggaccgaaccccgcgtttatgaacaaacgacccaacacccgtgcgttttattctgtctttttattgccgtcatagcgcgggttccttccggtattgtctccttccgtgtttcagttagcctcccccatctcccggtaccgcatgctatgcatcagctgctagcttactgcagccaccaccacagggagttcagggtggacaggttcacagcacgacggtgctcagggggggtcaggttgccgtaggtggaggactgcaggctgaagttacggatctcagacaggaacagcagggagtccaggtagtcccacatggggtcgatgaaggtgcgctggaaacgggtggatggggaggtgggggtggtcttgttgttgtcggaagcagtctcgttctcgacgggcatggtgtcgttgtagtacagggaggacatgtccagggtgccgtagatggtgtagggagtctcgttacggatcagcacgtgagtgttcttcatgaactcggacacagcggtacggttacggttgggcttgcagaagggctcgtcacggtaacgcagggtggtgtacacccaggtagccaggtccttcagctgagtggtcaggatagacttcatgaagttctcgtcgggacggtaaccgatggtagaggtggggatacgggtgggcacgatgggggagtaggtcacgttggtggaaacgttgaagatggtggaggtgtaggaggagtagggggtagtagtgctgacgcgggacttcttggagatggacttcacgggagcctgcttgcgcttcagcttgcgcatggtgttcttcagcttggtggagttgatgtacttgggcacacggaagatgttacgggacatagcgttgaccaggtagaaggaacgggtgcagttgcgctgagcgtaacgcagcagcagagcagccaggcccaggaagtagatagtctgggagtccacgttgaccttggaggggcccacgtacagcttggtgttccaacggggcacgttgaagaacatggggttgaaggtggtgaagttgccgcagttttcctcgccggtgttgttacgacgggacacgttcagcatctcggacaggcaggtcatggaggggatggtgccgcaagaggggggacggaaggtgatcttctggccggtgtggttgtactcggagtacacgtacttagcgggcttgcgcagctgggtggtgtggaagtcgaaccacaggtgggtgatggagtggttacggatgggaccagccaggatggagttgggggggaactgcttcatctcgacggtgatgttgtacagcttctgctggctggggaaggtgaagaacttgtagtagtcgccggtcttggaagccagctcttgcaggatacgcagcttcagctggcgttcctcttccttagccttctgggacttcacacggaaacgagccacagcgatcttgcagttgatgaagctgaacagcaggaaggtcagggacatcaggaagaacaggttgaacacgccacgcatctcgcccttgcgacccatggtggcctcgagatcccgggtgatcaagtcttcggtcgagtgattgtaaataaaatgtaatttacagtatagtattttaattaatatacaaatgatttgataataattcttatttaactataatatattgtgttgggttgaattaaaggtccgtatactagtatcgattcgcgacctactccggaatattaatagatcatggagataattaaaatgataaccatctcgcaaataaataagtattttactgttttcgtaacagttttgtaataaaaaaacctataaatattccggattattcataccgtcccaccatcgggcgcggatccgccaccatggaaaactggtccgctctggaactgctgcccaaggtcggaatccctaccgacttcctgacccacgtcaagacctccgctggcgaggaaatgttcgaggctctgaggatctactacggcgacgaccccgagcgttacaacatccacttcgaggctatcttcggcaccttctgcaaccgtctggaatgggtgtacttcctgacttccggcctggctgctgctgctcacgctatcaagttccacgacctgaacaagctgaccaccggcaagatgctgttccacgtgcaagtgccccgtgtggcttccggtgctggcctgcctacctcccgtcagaccaccatcatggtcaccaagtactccgagaagtcccccatcaccatccctttcgagctgtccgctgcttgcctgacttacctgcgtgaaaccttcgagggcaccatcctggacaagatcctgaacgtcgaggctatgcacaccgtgctgcgtgctctgaagaacaccgctgacgctatggaacgtggcctgatccacagcttcctccagaccctgctgaggaaggctcccccctacttcgtggtgcagaccctggtcgagaacgctaccctggctcgtcaggctctgaaccgtatccagcgctccaacatcctgcagtccttcaaggctaagatgctggctaccctgttcctgctgaaccgtacccgtgaccgtgactacgtgctgaagttcctgacccgtctggctgaggctgctaccgactccatcctcgacaaccctactacctacaccacctcctccggtgctaagatctccggtgtcatggtgtccaccgctaacgtgatgcagatcatcatgtccctgctgtcctcccacatcactaaggaaaccgtgtccgctcccgctacctacggcaacttcgtgctgtcccccgagaacgctgtgaccgctatctcctaccactctatcctggctgacttcaactcctacaaggctcacctgacctccggccagccccacctccccaacgactccctgagccaggctggtgctcactccctgacccccctgtccatggacgtgatccgtctgggcgaaaagaccgtgatcatggaaaacctgcgtcgcgtgtacaagaacaccgacaccaaggaccccctggaacgtaacgtggacctgaccttcttcttccccgtgggcctgtacctgcccgaggaccgtggttacaccaccgtcgagtccaaggtcaagctgaacgacaccgtgcgtaacgctctgcccaccaccgcttacctgctgaacagggaccgtgctgtgcaaaagatcgacttcgtggacgctctcaagaccctgtgccaccccgtgctgcacgagcctgctccatgcctgcaggctttcaccgagcgtggtcccccatccgagcccgctatgcagcgtctgctggaatgccgtttccagcaagagcccatgggtggtgctgctcgtcgtatcccccacttctaccgtgtgcgccgcgaggtgccccgtaccgtgaacgagatgaagcaggacttcgtggtcaccgacttctacaaggttggaaacatcaccctgtacaccgagctgcaccctttcttcgacttcacccactgccaagagaactccgagactgtggctctgtgcaccccccgtatcgtgatcggcaacctgcccgacggcctggctcccggtcccttccacgagctgaggacctgggagatcatggaacacatgcgcctgcgtcccccacccgactacgaggaaaccctgcgtctgttcaagaccaccgtgacctcccccaactaccccgagctgtgctacctggtggacgtgctggtgcacggcaacgctgacgctttcctgctgatccgcgctttcatcgctcgttgcatcgtgaacatgttccacacccgtcagctgctggtgttcgctcactcctacgctctggtcaccctgatcgctgagcacctggctgacggtgctctgcccccccagctcctgttccactaccgtaacctggtggctgtgctgcgcctggtcacccgtatctccgctctgcccggcctgaacaacggccagctggctgaggaacccctgtccgcttacgtgaacgctctgcacgaccacaggctgtggccccccttcgtgacccacctccctcgtaacatggaaggtgtccaggtggtggctgatcgtcagcccctgaaccccgctaacatcgaggctcgtcaccacggtgtctccgacgtgccccgtctgggtgctatggacgctgacgagcccctgttcgtggacgactaccgtgctaccgacgacgagtggaccctgcaaaaggtgttctacctgtgcctgatccccgctatgaccaacaaccgtgcttgcggcctgggcctgaacctcaagactctgctggtggacctgttctaccgtcccgccttcctgctcatgcccgctgctaccgctgtgtccacctccggcaccacctccaaggaatccacctctggtgtcacccccgaggactccgtggctgctcagcgtcaggctgtgggcgagatgctgaccgagctggtcgaggacgtggccaccgacgctcacacccctctgctgcaggcttgccgcgagctgttcctggctgtgcagttcgtgggcgagcacgtgaaggtgctggaagtgcgtgctcccctggaccacgctcagaggcagggactgcccgacttcatctcccgtcagcatgtgctgtacaacggttgctgcgtcgtgaccgctcctaagaccctgatcgagtactccctgcccgtgcccttccaccgtttctactccaaccccaccatctgcgctgctctgtccgacgacatcaagcgttacgtgaccgagttcccccactaccatagacacgatggtggtttccccctgcccaccgctttcgctcacgagtaccacaactggctgcgtagccccttctcccgttactccgctacctgccccaacgtgctgcactccgtgatgaccctggctgctatgctgtacaagatctcccccgtgtccctggtgctgcagaccaaggctcacatccaccccggtttcgctctgaccgctgtgcgtaccgacaccttcgaggtggacatgctgctgtactccggcaagtcctgcacctccgtcatcatcaacaaccccatcgtgaccaaggaagagagggacatctccaccacctaccacgtgacccagaacatcaacaccgtggacatgggcctgggttacacctccaacacttgcgtggcctacgtgaaccgcgtccgcaccgacatgggtgtccgtgtgcaggacctgttccgtgtgttccccatgaacgtgtaccgccacgatgaggtggaccgttggatcaggcacgctgctggcgtcgagcgtccccagctgctggacaccgagactatctccatgctgaccttcggttccatgtccgagcgcaacgctgctgctaccgtgcacggccagaaggctgtctgcgagctgatcctgacccctgtgactatggacgtgaactacttcaagatcaccaacaaccctcgtggtcgtgcttcctgcatgctgggcgtggacccctacgacaccgaggctgccaccaaggctatctacgaccaccgcgaggctgacgctcagaccttcgctgctacccacaacccatgggcttcccaggctggttgcctgtccgacgtcctgtacaacacccgtcaccgcgagcgtctgggctacaactccaagttctactccccctgcgctcagtacttcaacaccgaggaaatcatcgctgccaacaagaccctcttcaagaccatcgacgagtacctgctgcgcgctaaggactgcatccgtggcgacaccgacactcagtacgtgtgcgtcgagggaaccgagcagctgatcgagaacccttgccgtctgacccaagaggctctgcccatcctgtccaccaccaccctggctctgatggaaactaagctgaagggtggcgctggtgctttcgctacctccgagactcacttcggcaactacgtcgtgggagagatcatccccctgcagcagtccatgctgttcaacagctaagagctcaagcttgtcgagaagtactagaggatcataatcagccataccacatttgtagaggttttacttgctttaaaaaacctcccacacctccccctgaacctgaaacataaaatgaatgcaattgttgttgttaacttgtttattgcagcttataatggttacaaataaagcaatagcatcacaaatttcacaaataaagcatttttttcactgcattctagttgtggtttgtccaaactcatcaatgtatcttatcatgtctggatctgatcactgcttgagcctagaagatccggctgctaacaaagcccgaaaggaagctgagttggctgctgtggctagctttgtttaactttaagaaggagatacatctagaaatattaatagatcatggagataattaaaatgataaccatctcgcaaataaataagtattttactgttttcgtaacagttttgtaataaaaaaacctataaatattccggattattcataccgtcccaccatcgggcgcggatccgccaccatggctgctatggaagctaacatcttctgcaccttcgaccacaagctgtctatcgctgacgtgggcaagctgaccaagctggtggctgctgtggtgcccatcccccagcgtctgcacctgatcaagcactaccagctgggcctgcaccagttcgtggaccacacccgtggttacgtgcgtctgcgtggcctgctgcgtaacatgaccctgaccctgatgcgtcgtgtcgagggcaaccagatcctgctgcacgtgcccacccacggcctgctgtacaccgtgctgaacaccggtcccgtgacctgggagaagggcgacgctctgtgcgtgctgccccccctgttccacggtcccctggctcgtgaaaacctgttgaccctgggccagtgggagctggtgctgccctggatcgtgcccatgcccctggctctggaaatcaaccagcgcctgctgatcatgggcctgttctccctggaccgttcctacgaagaagtgaaggctgctgtccagcagctgcagaccatcaccttccgtgacgctaccttcaccatccccgaccccgtgatcgaccagcacctcctgatcgacatgaagaccgcttgcctgtccatgtccatggtggctaacctggcttccgagctgaccatgacctacgtccgcaagctggctttggaggactcttccatgctgctggtcaagtgccaagagctgctgatgcgtctggaccgcgagcgttccgtgggcgagcctcgtactcccgctcgtcctcagcacgtgtcccccgacgacgagatcgctcgtctgtccgctctgttcgtgatgctgcgtcagctggacgacctgatccgcgagcaggtcgtgttcaccgtgtgcgacgtgagcccagacaacaagtccgctacctgcatcttcaagggctaaggcgcgccaagcttgtcgagaagtactagaggatcataatcagccataccacatttgtagaggttttacttgctttaaaaaacctcccacacctccccctgaacctgaaacataaaatgaatgcaattgttgttgttaacttgtttattgcagcttataatggttacaaataaagcaatagcatcacaaatttcacaaataaagcatttttttcactgcattctagttgtggtttgtccaaactcatcaatgtatcttatcatgtctggatctgatcactgcttgagcctagaagatccggctgctaacaaagcccgaaaggaagctgagttggctgctgggtgcctaatgagtgagctaactcacattaattgcccggaatattaatagatcatggagataattaaaatgataaccatctcgcaaataaataagtattttactgttttcgtaacagttttgtaataaaaaaacctataaatattccggattattcataccgtcccaccatcgggcgcggatcccggtccgaagcgcgcggaattcaaaggcctacgtcgacgccaccatgtccaacaccgctcccggtcccaccgtggctaacaagcgtgacgagaagcaccgtcacgtggtcaacgtggtgctcgagctgcccaccgagatctccgaggctacccaccccgtgctggctaccatgctgtccaagtacacccgtatgtcctccctgttcaacgacaagtgcgctttcaagctggacctgctgcgtatggtggctgtgtcccgtacccgtcgctaaaagcttgtcgagaagtactagaggatcataatcagccataccacatttgtagaggttttacttgctttaaaaaacctcccacacctccccctgaacctgaaacataaaatgaatgcaattgttgttgttaacttgtttattgcagcttataatggttacaaataaagcaatagcatcacaaatttcacaaataaagcatttttttcactgcattctagttgtggtttgtccaaactcatcaatgtatcttatcatgtctggatctgatcactgcttgagcctagaagatccggctgctaacaaagcccgaaaggaagctgagttggctgctgggtgcctaatgagtgagctaactcacattaattgcccggaatattaatagatcatggagataattaaaatgataaccatctcgcaaataaataagtattttactgttttcgtaacagttttgtaataaaaaaacctataaatattccggattattcataccgtcccaccatcgggcgcggatcccggtccgaagcgcgcggaattcaaaggcctacgtcgacgccaccatggaatcccgtggtcgtcgttgccccgagatgatctccgtgctgggtcccatctccggtcacgtcctgaaggctgtgttctcccgtggcgacacccccgtgctgccccacgaaactcgtctgctgcagaccggtatccacgtgcgtgtgtcccagccctccctgatcctggtgtcccagtacacccccgactccaccccttgccaccgcggagacaaccagctgcaggtccagcacacctacttcaccggttccgaggtcgagaacgtgtccgtgaacgtgcacaaccccaccggtcgttccatctgcccctcccaagagcccatgtccatctacgtgtacgctctgcccctgaagatgctgaacatcccctccatcaacgtgcaccactacccctccgctgctgagcgcaagcaccgtcacctccccgtggctgacgctgtgatccacgcttccggcaagcagatgtggcaggctcgtctgaccgtgtccggcctggcttggacccgtcagcagaaccagtggaaggaacccgacgtgtactacacctccgctttcgtgttccccaccaaggacgtggccctgcgtcacgtcgtgtgcgctcacgaactcgtgtgctccatggaaaacacccgtgctaccaagatgcaagtgatcggcgaccagtacgtgaaggtgtacctggaatccttctgcgaggacgtgccctccggcaagctgttcatgcacgtgaccctgggttccgacgtggaagaggacctgaccatgacccgtaacccccagcccttcatgcgtccccacgagcgtaacggtttcaccgtgctgtgccccaagaacatgatcatcaagcccggcaagatctcccacatcatgctggacgtggccttcacctcccacgagcacttcggcctgctgtgccctaagtccatccccggcctgtccatctccggcaacctgctgatgaacggccagcagatcttcctggaagtgcaggctatccgtgaaaccgtcgagctgcgtcagtacgaccctgtggctgctctgttcttcttcgacatcgacctgctgctgcagcgtggtccccagtactccgagcaccccaccttcaccagccagtaccgtatccagggcaagctggaataccgtcacacctgggaccgtcacgacgagggtgctgctcagggcgacgacgacgtgtggacctccggttccgactccgacgaggaactggtcaccaccgagcgcaagaccccccgtgtgaccggtggtggtgctatggctggtgcttccacctccgctggtcgcaagcgcaagtccgcttcctccgctaccgcttgcaccgctggtgtcatgacccgtggtcgcctgaaggctgagtccaccgtggctcccgaagaggacactgacgaggactccgacaacgagatccacaaccccgctgtgttcacctggcccccctggcaggctggtatcctggctcgtaacctggtgcccatggtggctaccgtgcagggccagaacctgaagtaccaagagttcttctgggacgccaacgacatctaccgtatcttcgctgagctggaaggcgtgtggcagcccgctgctcagcccaagcgtcgtcgtcaccgtcaggacgctctgcctggtccctgtatcgcttccacccccaagaagcaccgcggctaaaagcttgtcgagaagtactagaggatcataatcagccataccacatttgtagaggttttacttgctttaaaaaacctcccacacctccccctgaacctgaaacataaaatgaatgcaattgttgttgttaacttgtttattgcagcttataatggttacaaataaagcaatagcatcacaaatttcacaaataaagcatttttttcactgcattctagttgtggtttgtccaaactcatcaatgtatcttatcatgtctggatctgatcactgcttgagcctagaagatccggctgctaacaaagcccgaaaggaagctgggaatattaatagatcaatggagataattaaaatgataaccatctcgcaaataaataagtattttactgttttcgtaacagttttgtaataaaaaaacctataaatattccggattattcataccgtcccaccatcgggcgcggatccgccaccatggccccctcccacgtggacaaggtgaacacccgcacctggtccgcctccatcgtgttcatggtgctgaccttcgtgaacgtgtccgtgcacctggtgctgtccaacttcccccacctgggctacccctgcgtgtactaccacgtggtggacttcgagcgcctgaacatgtccgcctacaacgtgatgcacctgcacacccccatgctgttcctggactccgtgcagctggtgtgctacgccgtgttcatgcagctggtgttcctggccgtgaccatctactacctggtgtgctggatcaagatctccatgcgcaaggacaagggcatgtccctgaaccagtccacccgcgacatctcctacatgggcgactccctgaccgccttcctgttcatcctgtccatggacaccttccagctgttcaccctgaccatgtccttccgcctgccctccatgatcgccttcatggccgccgtgcacttcttctgcctgaccatcttcaacgtgtccatggtgacccagtaccgctcctacaagcgctccctgttcttcttctcccgcctgcaccccaagctgaagggcaccgtgcagttccgcaccctgatcgtgaacctggtggaggtggccctgggcttcaacaccaccgtggtggccatggccctgtgctacggcttcggcaacaacttcttcgtgcgcaccggccacatggtgctggccgtgttcgtggtgtacgccatcatctccatcatctacttcctgctgatcgaggccgtgttcttccagtacgtgaaggtgcagttcggctaccacctgggcgccttcttcggcctgtgcggcctgatctaccccatcgtgcagtacgacaccttcctgtccaacgagtaccgcaccggcatctcctggtccttcggcatgctgttcttcatctgggccatgttcaccacctgccgcgccgtgcgctacttccgcggccgcggctccggctccgtgaagtaccaggccctggccaccgcctccggcgaggaggtggccgccctgtcccaccacgactccctggagtcccgccgcctgcgcgaggaggaggacgacgacgacgacgaggacttcgaggacgcctaagagctcaagcttgtcgagaagtactagaggatcataatcagccataccacatttgtagaggttttacttgctttaaaaaacctcccacacctccccctgaacctgaaacataaaatgaatgcaattgttgttgttaacttgtttattgcagcttataatggttacaaataaagcaatagcatcacaaatttcacaaataaagcatttttttcactgcattctagttgtggtttgtccaaactcatcaatgtatcttatcatgtctggatctgatcactgcttgagcctagaagatccggctgctaacaaagcccgaaaggaagctgagttggctgctgccaccgctgagcaataactatcataacccctaggagatccgaaccagataagtgaaatctagttccaaactattttgtcatttttaattttcgtattagcttacgacgctacacccagttcccatctattttgtcactcttccctaaataatccttaaaaactccatttccacccctcccagttcccaactattttgtccgcccaca

SEQ ID NO: 84 - DNA, 17186 bp, Artificial Sequence; identical to SEQ ID NO: 77
  Synthetic construct

SEQ ID NO: 85 - DNA, 7308 bp, Artificial Sequence
  Synthetic construct
aattctgtcagccgttaagtgttcctgtgtcactcaaaattgctttgagaggctctaagggcttctcagtgcgttacatccctggcttgttgtccacaaccgttaaaccttaaaagctttaaaagccttatatattcttttttttcttataaaacttaaaaccttagaggctatttaagttgctgatttatattaattttattgttcaaacatgagagcttagtacgtgaaacatgagagcttagtacgttagccatgagagcttagtacgttagccatgagggtttagttcgttaaacatgagagcttagtacgttaaacatgagagcttagtacgtgaaacatgagagcttagtacgtactatcaacaggttgaactgctgatcaacagatcctctacgcggccgcggtaccataacttcgtatagcatacattatacgaagttatctggtttaaacgtacccgtagtggctatggcagggcttgccgccccgacgttggctgcgagccctgggccttcacccgaacttgggggttggggtggggaaaaggaagaaacgcgggcgtattggtcccaatggggtctcggtggggtatcgacagagtgccagccctgggaccgaaccccgcgtttatgaacaaacgacccaacacccgtgcgttttattctgtctttttattgccgtcatagcgcgggttccttccggtattgtctccttccgtgtttcagttagcctcccccatctcccggtaccgcatgctatgcatcagctgctagcaccatggctcgagatcccgggtgatcaagtcttcgtcgagtgattgtaaataaaatgtaatttacagtatagtattttaattaatatacaaatgatttgataataattcttatttaactataatatattgtgttgggttgaattaaaggtccgtatactagtatcgattcgcgacctactccggaatattaatagatcatggagataattaaaatgataaccatctcgcaaataaataagtattttactgttttcgtaacagttttgtaataaaaaaacctataaatattccggattattcataccgtcccaccatcgggcgcggatcccggtccgaagcgcgcggaattcaaaggcctaccgtcgacgccaccatggaatcccgtggtcgtcgttgccccgagatgatctccgtgctgggtcccatctccggtcacgtcctgaaggctgtgttctcccgtggcgacacccccgtgctgccccacgaaactcgtctgctgcagaccggtatccacgtgcgtgtgtcccagccctccctgatcctggtgtcccagtacacccccgactccaccccttgccaccgcggagacaaccagctgcaggtccagcacacctacttcaccggttccgaggtcgagaacgtgtccgtgaacgtgcacaaccccaccggtcgttccatctgcccctcccaagagcccatgtccatctacgtgtacgctctgcccctgaagatgctgaacatcccctccatcaacgtgcaccactacccctccgctgctgagcgcaagcaccgtcacctccccgtggctgacgctgtgatccacgcttccggcaagcagatgtggcaggctcgtctgaccgtgtccggcctggcttggacccgtcagcagaaccagtggaaggaacccgacgtgtactacacctccgctttcgtgttccccaccaaggacgtggccctgcgtcacgtcgtgtgcgctcacgaactcgtgtgctccatggaaaacacccgtgctaccaagatgcaagtgatcggcgaccagtacgtgaaggtgtacctggaatccttctgcgaggacgtgccctccggcaagctgttcatgcacgtgaccctgggttccgacgtggaagaggacctgaccatgacccgtaacccccagcccttcatgcgtccccacgagcgtaacggtttcaccgtgctgtgccccaagaacatgatcatcaagcccggcaagatctcccacatcatgctggacgtggccttcacctcccacgagcacttcggcctgctgtgccctaagtccatccccggcctgtccatctccggcaacctgctgatgaacggccagcagatcttcctggaagtgcaggctatccgtgaaaccgtcgagctgcgtcagtacgaccctgtggctgctctgttcttcttcgacatcgacctgctgctgcagcgtggtccccagtactccgagcaccccaccttcaccagccagtaccgtatccagggcaagctggaataccgtcacacctgggaccgtcacgacgagggtgctgctcagggcgacgacgacgtgtggacctccggttccgactccgacgaggaactggtcaccaccgagcgcaagaccccccgtgtgaccggtggtggtgctatggctggtgcttccacctccgctggtcgcaagcgcaagtccgcttcctccgctaccgcttgcaccgctggtgtcatgacccgtggtcgcctgaaggctgagtccaccgtggctcccgaagaggacactgacgaggactccgacaacgagatccacaaccccgctgtgttcacctggcccccctggcaggctggtatcctggctcgtaacctggtgcccatggtggctaccgtgcagggccagaacctgaagtaccaagagttcttctgggacgccaacgacatctaccgtatcttcgctgagctggaaggcgtgtggcagcccgctgctcagcccaagcgtcgtcgtcaccgtcaggacgctctgcctggtccctgtatcgcttccacccccaagaagcaccgcggctaaaagcttgtcgagaagtactagaggatcataatcagccataccacatttgtagaggttttacttgctttaaaaaacctcccacacctccccctgaacctgaaacataaaatgaatgcaattgttgttgttaacttgtttattgcagcttataatggttacaaataaagcaatagcatcacaaatttcacaaataaagcatttttttcactgcattctagttgtggtttgtccaaactcatcaatgtatcttatcatgtctggatctgatcactgcttgagcctagaagatccggctgctaacaaagcccgaaaggaagctgagttggctgctgtggctagctttgtttaactttaagaaggagatacatctagacctgcaggccggaatattaatagatcatggagataattaaaatgataaccatctcgcaaataaataagtattttactgttttcgtaacagttttgtaataaaaaaacctataaatattccggattattcataccgtcccaccatcgggcgcggatcccggtccgaagcgcgcggaattcgccaccatgaccatggacgagcagcagccccaggctgtgacccccgtgtacgtgggcggtttcctggctcgttacgaccagtcccccgacgaggctgagctgctgctgccacgtgacgtggtcgaacactggctgcacgctcagggccagggacagccttccctgtccgtggctctgcccctgaacatcaaccacgacgacaccgctgtcgtgggtcacgtggccgctatgcagtccgtgcgtgacggcctgttctgcctgggttgcgtgacctccccccgtttcctggaaatcgtgcgtcgtgcttccgagaagtccgagctggtgtcccgtggtcccgtgtccccactgcagcccgacaaggtggtcgagttcctgtccggttcctacgctggcctgtccctgtcatcccgtcgttgcgacgacgtcgaggctgctacctccctgagcggctccgagactacccccttcaagcacgtggccctgtgctccgtgggtcgtaggcgtggaaccctggctgtgtacggtcgtgaccccgagtgggtcacccagcgtttccccgacctgaccgctgctgaccgtgacggactgcgtgctcagtggcagcgttgcggttccaccgctgtggacgcttccggcgaccccttccgttccgactcctacggcctgctgggcaactccgtggacgctctgtacatccgcgagcgtctgcccaagctgcgttacgacaagcagctcgtgggtgtcaccgagcgcgagtcctacgtgaaggcttccgtgtcccccgaggctgcttgcgacatcaaggctgcttccgctgagcgttctggcgacagccgctcccaggctgctactcctgctgctggtgctcgtgtgccctccagctccccatccccacctgtcgagcctccctcccccgtgcaacctcctgctctgcctgcttccccctccgtgctgcctgctgagtccagcccctccctgtcaccctctgagcctgctgaggctgcctccatgtcccaccctctgagcgctgctgtgactgctgctaccgctccccctggtgctactgtggctggtgcttcccccgctgtgccttccctggcttggcctcacgacggtgtctacctgcccaaggacgctttcttctccctgctgggcgcttcccgttccgctgctcccgtgatgtaccccggtgctgtggctgctccccccagcgcttcacctgctcctctgcccctgccctcctaccccgcttcctacggtgctcccgtcgtgggttacgaccagctggctgctcgtcacttcgctgactacgtggacccccactaccccggctggggtcgtcgttacgagcccgctccttccctgcacccatcctaccctgtgccccctcctccatcacccgcttactaccgtcgtcgtgactcccccggtggcatggacgagcctccatctggatgggagcgttacgacggttcccaccgtggccagtcccaaaagcagcaccgtcacggtggttccggtggtcacaacaagcgtcgcaaggaagccgctgctgcatcctccagctccgacgaggacctgagcttccccggcgaggctgaacacggtcgtgctcgcaagcgtctgaagtcccacgtgaactccgacggaggtagcggaggccacgctggttccaaccagcagcagcaacagcgctacgacgagctgcgtgacgctatccacgagctgaagcgtgacctgttcgctgctcgccagtcctccaccctgctgtctgctgctctgccagctgccgcttcttcctcccctaccaccaccaccgtgtgcacccctactggcgagctgacctctggtggtggcgagactcccaccgctctgctgtccggtggtgctaaggtggccgagcgtgctcaggctggtgtcgtgaacgcttcctgccgtctggctaccgcttccggttccgaggctgccaccgctggtccctctaccgctggttcctcatcctgcccagcttccgtggtgctggctgccgctgctgctcaagccgccgctgcttcacagtcccccccaaaggatatggtggacctgaaccgtcgtatcttcgtggctgctctgaacaagctcgagtaataaaagcttgtcgagaagtactagaggatcataatcagccataccacatttgtagaggttttacttgctttaaaaaacctcccacacctccccctgaacctgaaacataaaatgaatgcaattgttgttgttaacttgtttattgcagcttataatggttacaaataaagcaatagcatcacaaatttcacaaataaagcatttttttcactgcattctagttgtggtttgtccaaactcatcaatgtatcttatcatgtctggatctgatcactgcttgagcctagaagatccggctgctaacaaagcccgaaaggaagctgagttggctgctgccaccgctgagcaataactatcataacccctaggggcctctaaacgggtcttgaggggttttttgctgaaaggaggaactatatccggatctgaacaggagggacagctgatagaaacagaagccactggagcacctcaaaaacaccatcatacactaaatcagtaagttggcagcatcacccgacgcactttgcgccgaataaatacctgtgacggaagatcacttcgcagaataaataaatcctggtgtccctgttgataccgggaagccctgggccaacttttggcgaaaatgagacgttgatcggcacgtaagaggttccaactttcaccataatgaaataagatcactaccgggcgtattttttgagttatcgagattttcaggagctaaggaagctaaaatggagaaaaaaatcactggatataccaccgttgatatatcccaatggcatcgtaaagaacattttgaggcatttcagtcagttgctcaatgtacctataaccagaccgttcagctggatattacggcctttttaaagaccgtaaagaaaaataagcacaagttttatccggcctttattcacattcttgcccgcctgatgaatgctcatccggaattccgtatggcaatgaaagacggtgagctggtgatatgggatagtgttcacccttgttacaccgttttccatgagcaaactgaaacgttttcatcgctctggagtgaataccacgacgatttccggcagtttctacacatatattcgcaagatgtggcgtgttacggtgaaaacctggcctatttccctaaagggtttattgagaatatgtttttcgtctcagccaatccctgggtgagtttcaccagttttgatttaaacgtggccaatatggacaacttcttcgcccccgttttcaccatgggcaaatattatacgcaaggcgacaaggtgctgatgccgctggcgattcaggttcatcatgccgtttgtgatggcttccatgtcggcagaatgcttaatgaattacaacagtactgcgatgagtggcagggcggggcgtaatttttttaaggcagttattggtgcccttaaacgcctggttgctacgcctgaataagtgataataagcggatgaatggcagaaattcgaaagcaaattcgacccggtcgtcggttcagggcagggtcgttaaatagccgcttatgtctattgctggtttaccggtttattgactaccggaagcagtgtgaccgtgtgcttctcaaatgcctgaggccagtttgctcaggctctccccgtggaggtaataattgacgatatgatcatttattctgcctcccagctgacattcatccggggtcagcaccgtttctgcggactggctttctacgtgttccgcttcctttagcagcccttgcgccctgagtgcttgcggcagcgtgaagct

SEQ ID NO: 86 - DNA, 8470 bp, Artificial Sequence
  Synthetic construct
aattctgtcagccgttaagtgttcctgtgtcactcaaaattgctttgagaggctctaagggcttctcagtgcgttacatccctggcttgttgtccacaaccgttaaaccttaaaagctttaaaagccttatatattcttttttttcttataaaacttaaaaccttagaggctatttaagttgctgatttatattaattttattgttcaaacatgagagcttagtacgtgaaacatgagagcttagtacgttagccatgagagcttagtacgttagccatgagggtttagttcgttaaacatgagagcttagtacgttaaacatgagagcttagtacgtgaaacatgagagcttagtacgtactatcaacaggttgaactgctgatcaacagatcctctacgcggccgcggtaccataacttcgtatagcatacattatacgaagttatctggtttaaacgtacccgtagtggctatggcagggcttgccgccccgacgttggctgcgagccctgggccttcacccgaacttgggggttggggtggggaaaaggaagaaacgcgggcgtattggtcccaatggggtctcggtggggtatcgacagagtgccagccctgggaccgaaccccgcgtttatgaacaaacgacccaacacccgtgcgttttattctgtctttttattgccgtcatagcgcgggttccttccggtattgtctccttccgtgtttcagttagcctcccccatctcccggtaccgcatgctatgcatcagctgctagcaccatggctcgagatcccgggtgatcaagtcttcgtcgagtgattgtaaataaaatgtaatttacagtatagtattttaattaatatacaaatgatttgataataattcttatttaactataatatattgtgttgggttgaattaaaggtccgtatactagtatcgattcgcgacctactccggaatattaatagatcatggagataattaaaatgataaccatctcgcaaataaataagtattttactgttttcgtaacagttttgtaataaaaaaacctataaatattccggattattcataccgtcccaccatcgggcgcggatccgccaccatggaaaactggtccgctctggaactgctgcccaaggtcggaatccctaccgacttcctgacccacgtcaagacctccgctggcgaggaaatgttcgaggctctgaggatctactacggcgacgaccccgagcgttacaacatccacttcgaggctatcttcggcaccttctgcaaccgtctggaatgggtgtacttcctgacttccggcctggctgctgctgctcacgctatcaagttccacgacctgaacaagctgaccaccggcaagatgctgttccacgtgcaagtgccccgtgtggcttccggtgctggcctgcctacctcccgtcagaccaccatcatggtcaccaagtactccgagaagtcccccatcaccatccctttcgagctgtccgctgcttgcctgacttacctgcgtgaaaccttcgagggcaccatcctggacaagatcctgaacgtcgaggctatgcacaccgtgctgcgtgctctgaagaacaccgctgacgctatggaacgtggcctgatccacagcttcctccagaccctgctgaggaaggctcccccctacttcgtggtgcagaccctggtcgagaacgctaccctggctcgtcaggctctgaaccgtatccagcgctccaacatcctgcagtccttcaaggctaagatgctggctaccctgttcctgctgaaccgtacccgtgaccgtgactacgtgctgaagttcctgacccgtctggctgaggctgctaccgactccatcctcgacaaccctactacctacaccacctcctccggtgctaagatctccggtgtcatggtgtccaccgctaacgtgatgcagatcatcatgtccctgctgtcctcccacatcactaaggaaaccgtgtccgctcccgctacctacggcaacttcgtgctgtcccccgagaacgctgtgaccgctatctcctaccactctatcctggctgacttcaactcctacaaggctcacctgacctccggccagccccacctccccaacgactccctgagccaggctggtgctcactccctgacccccctgtccatggacgtgatccgtctgggcgaaaagaccgtgatcatggaaaacctgcgtcgcgtgtacaagaacaccgacaccaaggaccccctggaacgtaacgtggacctgaccttcttcttccccgtgggcctgtacctgcccgaggaccgtggttacaccaccgtcgagtccaaggtcaagctgaacgacaccgtgcgtaacgctctgcccaccaccgcttacctgctgaacagggaccgtgctgtgcaaaagatcgacttcgtggacgctctcaagaccctgtgccaccccgtgctgcacgagcctgctccatgcctgcaggctttcaccgagcgtggtcccccatccgagcccgctatgcagcgtctgctggaatgccgtttccagcaagagcccatgggtggtgctgctcgtcgtatcccccacttctaccgtgtgcgccgcgaggtgccccgtaccgtgaacgagatgaagcaggacttcgtggtcaccgacttctacaaggttggaaacatcaccctgtacaccgagctgcaccctttcttcgacttcacccactgccaagagaactccgagactgtggctctgtgcaccccccgtatcgtgatcggcaacctgcccgacggcctggctcccggtcccttccacgagctgaggacctgggagatcatggaacacatgcgcctgcgtcccccacccgactacgaggaaaccctgcgtctgttcaagaccaccgtgacctcccccaactaccccgagctgtgctacctggtggacgtgctggtgcacggcaacgctgacgctttcctgctgatccgcgctttcatcgctcgttgcatcgtgaacatgttccacacccgtcagctgctggtgttcgctcactcctacgctctggtcaccctgatcgctgagcacctggctgacggtgctctgcccccccagctcctgttccactaccgtaacctggtggctgtgctgcgcctggtcacccgtatctccgctctgcccggcctgaacaacggccagctggctgaggaacccctgtccgcttacgtgaacgctctgcacgaccacaggctgtggccccccttcgtgacccacctccctcgtaacatggaaggtgtccaggtggtggctgatcgtcagcccctgaaccccgctaacatcgaggctcgtcaccacggtgtctccgacgtgccccgtctgggtgctatggacgctgacgagcccctgttcgtggacgactaccgtgctaccgacgacgagtggaccctgcaaaaggtgttctacctgtgcctgatccccgctatgaccaacaaccgtgcttgcggcctgggcctgaacctcaagactctgctggtggacctgttctaccgtcccgccttcctgctcatgcccgctgctaccgctgtgtccacctccggcaccacctccaaggaatccacctctggtgtcacccccgaggactccgtggctgctcagcgtcaggctgtgggcgagatgctgaccgagctggtcgaggacgtggccaccgacgctcacacccctctgctgcaggcttgccgcgagctgttcctggctgtgcagttcgtgggcgagcacgtgaaggtgctggaagtgcgtgctcccctggaccacgctcagaggcagggactgcccgacttcatctcccgtcagcatgtgctgtacaacggttgctgcgtcgtgaccgctcctaagaccctgatcgagtactccctgcccgtgcccttccaccgtttctactccaaccccaccatctgcgctgctctgtccgacgacatcaagcgttacgtgaccgagttcccccactaccatagacacgatggtggtttccccctgcccaccgctttcgctcacgagtaccacaactggctgcgtagccccttctcccgttactccgctacctgccccaacgtgctgcactccgtgatgaccctggctgctatgctgtacaagatctcccccgtgtccctggtgctgcagaccaaggctcacatccaccccggtttcgctctgaccgctgtgcgtaccgacaccttcgaggtggacatgctgctgtactccggcaagtcctgcacctccgtcatcatcaacaaccccatcgtgaccaaggaagagagggacatctccaccacctaccacgtgacccagaacatcaacaccgtggacatgggcctgggttacacctccaacacttgcgtggcctacgtgaaccgcgtccgcaccgacatgggtgtccgtgtgcaggacctgttccgtgtgttccccatgaacgtgtaccgccacgatgaggtggaccgttggatcaggcacgctgctggcgtcgagcgtccccagctgctggacaccgagactatctccatgctgaccttcggttccatgtccgagcgcaacgctgctgctaccgtgcacggccagaaggctgtctgcgagctgatcctgacccctgtgactatggacgtgaactacttcaagatcaccaacaaccctcgtggtcgtgcttcctgcatgctgggcgtggacccctacgacaccgaggctgccaccaaggctatctacgaccaccgcgaggctgacgctcagaccttcgctgctacccacaacccatgggcttcccaggctggttgcctgtccgacgtcctgtacaacacccgtcaccgcgagcgtctgggctacaactccaagttctactccccctgcgctcagtacttcaacaccgaggaaatcatcgctgccaacaagaccctcttcaagaccatcgacgagtacctgctgcgcgctaaggactgcatccgtggcgacaccgacactcagtacgtgtgcgtcgagggaaccgagcagctgatcgagaacccttgccgtctgacccaagaggctctgcccatcctgtccaccaccaccctggctctgatggaaactaagctgaagggtggcgctggtgctttcgctacctccgagactcacttcggcaactacgtcgtgggagagatcatccccctgcagcagtccatgctgttcaacagctaagagctcaagcttgtcgagaagtactagaggatcataatcagccataccacatttgtagaggttttacttgctttaaaaaacctcccacacctccccctgaacctgaaacataaaatgaatgcaattgttgttgttaacttgtttattgcagcttataatggttacaaataaagcaatagcatcacaaatttcacaaataaagcatttttttcactgcattctagttgtggtttgtccaaactcatcaatgtatcttatcatgtctggatctgatcactgcttgagcctagaagatccggctgctaacaaagcccgaaaggaagctgagttggctgctgtggctagctttgtttaactttaagaaggagatacatctagaaatattaatagatcatggagataattaaaatgataaccatctcgcaaataaataagtattttactgttttcgtaacagttttgtaataaaaaaacctataaatattccggattattcataccgtcccaccatcgggcgcggatccgccaccatggctgctatggaagctaacatcttctgcaccttcgaccacaagctgtctatcgctgacgtgggcaagctgaccaagctggtggctgctgtggtgcccatcccccagcgtctgcacctgatcaagcactaccagctgggcctgcaccagttcgtggaccacacccgtggttacgtgcgtctgcgtggcctgctgcgtaacatgaccctgaccctgatgcgtcgtgtcgagggcaaccagatcctgctgcacgtgcccacccacggcctgctgtacaccgtgctgaacaccggtcccgtgacctgggagaagggcgacgctctgtgcgtgctgccccccctgttccacggtcccctggctcgtgaaaacctgttgaccctgggccagtgggagctggtgctgccctggatcgtgcccatgcccctggctctggaaatcaaccagcgcctgctgatcatgggcctgttctccctggaccgttcctacgaagaagtgaaggctgctgtccagcagctgcagaccatcaccttccgtgacgctaccttcaccatccccgaccccgtgatcgaccagcacctcctgatcgacatgaagaccgcttgcctgtccatgtccatggtggctaacctggcttccgagctgaccatgacctacgtccgcaagctggctttggaggactcttccatgctgctggtcaagtgccaagagctgctgatgcgtctggaccgcgagcgttccgtgggcgagcctcgtactcccgctcgtcctcagcacgtgtcccccgacgacgagatcgctcgtctgtccgctctgttcgtgatgctgcgtcagctggacgacctgatccgcgagcaggtcgtgttcaccgtgtgcgacgtgagcccagacaacaagtccgctacctgcatcttcaagggctaaggcgcgccaagcttgtcgagaagtactagaggatcataatcagccataccacatttgtagaggttttacttgctttaaaaaacctcccacacctccccctgaacctgaaacataaaatgaatgcaattgttgttgttaacttgtttattgcagcttataatggttacaaataaagcaatagcatcacaaatttcacaaataaagcatttttttcactgcattctagttgtggtttgtccaaactcatcaatgtatcttatcatgtctggatctgatcactgcttgagcctagaagatccggctgctaacaaagcccgaaaggaagctgagttggctgctgccaccgctgagcaataactatcataacccctaggggcctctaaacgggtcttgaggggttttttgctgaaaggaggaactatatccggatctgaacaggagggacagctgatagaaacagaagccactggagcacctcaaaaacaccatcatacactaaatcagtaagttggcagcatcacccgacgcactttgcgccgaataaatacctgtgacggaagatcacttcgcagaataaataaatcctggtgtccctgttgataccgggaagccctgggccaacttttggcgaaaatgagacgttgatcggcacgtaagaggttccaactttcaccataatgaaataagatcactaccgggcgtattttttgagttatcgagattttcaggagctaaggaagctaaaatggagaaaaaaatcactggatataccaccgttgatatatcccaatggcatcgtaaagaacattttgaggcatttcagtcagttgctcaatgtacctataaccagaccgttcagctggatattacggcctttttaaagaccgtaaagaaaaataagcacaagttttatccggcctttattcacattcttgcccgcctgatgaatgctcatccggaattccgtatggcaatgaaagacggtgagctggtgatatgggatagtgttcacccttgttacaccgttttccatgagcaaactgaaacgttttcatcgctctggagtgaataccacgacgatttccggcagtttctacacatatattcgcaagatgtggcgtgttacggtgaaaacctggcctatttccctaaagggtttattgagaatatgtttttcgtctcagccaatccctgggtgagtttcaccagttttgatttaaacgtggccaatatggacaacttcttcgcccccgttttcaccatgggcaaatattatacgcaaggcgacaaggtgctgatgccgctggcgattcaggttcatcatgccgtttgtgatggcttccatgtcggcagaatgcttaatgaattacaacagtactgcgatgagtggcagggcggggcgtaatttttttaaggcagttattggtgcccttaaacgcctggttgctacgcctgaataagtgataataagcggatgaatggcagaaattcgaaagcaaattcgacccggtcgtcggttcagggcagggtcgttaaatagccgcttatgtctattgctggtttaccggtttattgactaccggaagcagtgtgaccgtgtgcttctcaaatgcctgaggccagtttgctcaggctctccccgtggaggtaataattgacgatatgatcatttattctgcctcccagctgacattcatccggggtcagcaccgtttctgcggactggctttctacgtgttccgcttcctttagcagcccttgcgccctgagtgcttgcggcagcgtgaagct

SEQ ID NO: 87 - DNA, 9702 bp, Artificial Sequence
  Synthetic construct
aattctgtcagccgttaagtgttcctgtgtcactcaaaattgctttgagaggctctaagggcttctcagtgcgttacatccctggcttgttgtccacaaccgttaaaccttaaaagctttaaaagccttatatattcttttttttcttataaaacttaaaaccttagaggctatttaagttgctgatttatattaattttattgttcaaacatgagagcttagtacgtgaaacatgagagcttagtacgttagccatgagagcttagtacgttagccatgagggtttagttcgttaaacatgagagcttagtacgttaaacatgagagcttagtacgtgaaacatgagagcttagtacgtactatcaacaggttgaactgctgatcaacagatcctctacgcggccgcggtaccataacttcgtatagcatacattatacgaagttatctggtttaaacgtacccgtagtggctatggcagggcttgccgccccgacgttggctgcgagccctgggccttcacccgaacttgggggttggggtggggaaaaggaagaaacgcgggcgtattggtcccaatggggtctcggtggggtatcgacagagtgccagccctgggaccgaaccccgcgtttatgaacaaacgacccaacacccgtgcgttttattctgtctttttattgccgtcatagcgcgggttccttccggtattgtctccttccgtgtttcagttagcctcccccatctcccggtaccgcatgctatgcatcagctgctagcaccatggctcgagatcccgggtgatcaagtcttcgtcgagtgattgtaaataaaatgtaatttacagtatagtattttaattaatatacaaatgatttgataataattcttatttaactataatatattgtgttgggttgaattaaaggtccgtatactagtatcgattcgcgacctactccggaatattaatagatcatggagataattaaaatgataaccatctcgcaaataaataagtattttactgttttcgtaacagttttgtaataaaaaaacctataaatattccggattattcataccgtcccaccatcgggcgcggatccgccaccatggaaaactggtccgctctggaactgctgcccaaggtcggaatccctaccgacttcctgacccacgtcaagacctccgctggcgaggaaatgttcgaggctctgaggatctactacggcgacgaccccgagcgttacaacatccacttcgaggctatcttcggcaccttctgcaaccgtctggaatgggtgtacttcctgacttccggcctggctgctgctgctcacgctatcaagttccacgacctgaacaagctgaccaccggcaagatgctgttccacgtgcaagtgccccgtgtggcttccggtgctggcctgcctacctcccgtcagaccaccatcatggtcaccaagtactccgagaagtcccccatcaccatccctttcgagctgtccgctgcttgcctgacttacctgcgtgaaaccttcgagggcaccatcctggacaagatcctgaacgtcgaggctatgcacaccgtgctgcgtgctctgaagaacaccgctgacgctatggaacgtggcctgatccacagcttcctccagaccctgctgaggaaggctcccccctacttcgtggtgcagaccctggtcgagaacgctaccctggctcgtcaggctctgaaccgtatccagcgctccaacatcctgcagtccttcaaggctaagatgctggctaccctgttcctgctgaaccgtacccgtgaccgtgactacgtgctgaagttcctgacccgtctggctgaggctgctaccgactccatcctcgacaaccctactacctacaccacctcctccggtgctaagatctccggtgtcatggtgtccaccgctaacgtgatgcagatcatcatgtccctgctgtcctcccacatcactaaggaaaccgtgtccgctcccgctacctacggcaacttcgtgctgtcccccgagaacgctgtgaccgctatctcctaccactctatcctggctgacttcaactcctacaaggctcacctgacctccggccagccccacctccccaacgactccctgagccaggctggtgctcactccctgacccccctgtccatggacgtgatccgtctgggcgaaaagaccgtgatcatggaaaacctgcgtcgcgtgtacaagaacaccgacaccaaggaccccctggaacgtaacgtggacctgaccttcttcttccccgtgggcctgtacctgcccgaggaccgtggttacaccaccgtcgagtccaaggtcaagctgaacgacaccgtgcgtaacgctctgcccaccaccgcttacctgctgaacagggaccgtgctgtgcaaaagatcgacttcgtggacgctctcaagaccctgtgccaccccgtgctgcacgagcctgctccatgcctgcaggctttcaccgagcgtggtcccccatccgagcccgctatgcagcgtctgctggaatgccgtttccagcaagagcccatgggtggtgctgctcgtcgtatcccccacttctaccgtgtgcgccgcgaggtgccccgtaccgtgaacgagatgaagcaggacttcgtggtcaccgacttctacaaggttggaaacatcaccctgtacaccgagctgcaccctttcttcgacttcacccactgccaagagaactccgagactgtggctctgtgcaccccccgtatcgtgatcggcaacctgcccgacggcctggctcccggtcccttccacgagctgaggacctgggagatcatggaacacatgcgcctgcgtcccccacccgactacgaggaaaccctgcgtctgttcaagaccaccgtgacctcccccaactaccccgagctgtgctacctggtggacgtgctggtgcacggcaacgctgacgctttcctgctgatccgcgctttcatcgctcgttgcatcgtgaacatgttccacacccgtcagctgctggtgttcgctcactcctacgctctggtcaccctgatcgctgagcacctggctgacggtgctctgcccccccagctcctgttccactaccgtaacctggtggctgtgctgcgcctggtcacccgtatctccgctctgcccggcctgaacaacggccagctggctgaggaacccctgtccgcttacgtgaacgctctgcacgaccacaggctgtggccccccttcgtgacccacctccctcgtaacatggaaggtgtccaggtggtggctgatcgtcagcccctgaaccccgctaacatcgaggctcgtcaccacggtgtctccgacgtgccccgtctgggtgctatggacgctgacgagcccctgttcgtggacgactaccgtgctaccgacgacgagtggaccctgcaaaaggtgttctacctgtgcctgatccccgctatgaccaacaaccgtgcttgcggcctgggcctgaacctcaagactctgctggtggacctgttctaccgtcccgccttcctgctcatgcccgctgctaccgctgtgtccacctccggcaccacctccaaggaatccacctctggtgtcacccccgaggactccgtggctgctcagcgtcaggctgtgggcgagatgctgaccgagctggtcgaggacgtggccaccgacgctcacacccctctgctgcaggcttgccgcgagctgttcctggctgtgcagttcgtgggcgagcacgtgaaggtgctggaagtgcgtgctcccctggaccacgctcagaggcagggactgcccgacttcatctcccgtcagcatgtgctgtacaacggttgctgcgtcgtgaccgctcctaagaccctgatcgagtactccctgcccgtgcccttccaccgtttctactccaaccccaccatctgcgctgctctgtccgacgacatcaagcgttacgtgaccgagttcccccactaccatagacacgatggtggtttccccctgcccaccgctttcgctcacgagtaccacaactggctgcgtagccccttctcccgttactccgctacctgccccaacgtgctgcactccgtgatgaccctggctgctatgctgtacaagatctcccccgtgtccctggtgctgcagaccaaggctcacatccaccccggtttcgctctgaccgctgtgcgtaccgacaccttcgaggtggacatgctgctgtactccggcaagtcctgcacctccgtcatcatcaacaaccccatcgtgaccaaggaagagagggacatctccaccacctaccacgtgacccagaacatcaacaccgtggacatgggcctgggttacacctccaacacttgcgtggcctacgtgaaccgcgtccgcaccgacatgggtgtccgtgtgcaggacctgttccgtgtgttccccatgaacgtgtaccgccacgatgaggtggaccgttggatcaggcacgctgctggcgtcgagcgtccccagctgctggacaccgagactatctccatgctgaccttcggttccatgtccgagcgcaacgctgctgctaccgtgcacggccagaaggctgtctgcgagctgatcctgacccctgtgactatggacgtgaactacttcaagatcaccaacaaccctcgtggtcgtgcttcctgcatgctgggcgtggacccctacgacaccgaggctgccaccaaggctatctacgaccaccgcgaggctgacgctcagaccttcgctgctacccacaacccatgggcttcccaggctggttgcctgtccgacgtcctgtacaacacccgtcaccgcgagcgtctgggctacaactccaagttctactccccctgcgctcagtacttcaacaccgaggaaatcatcgctgccaacaagaccctcttcaagaccatcgacgagtacctgctgcgcgctaaggactgcatccgtggcgacaccgacactcagtacgtgtgcgtcgagggaaccgagcagctgatcgagaacccttgccgtctgacccaagaggctctgcccatcctgtccaccaccaccctggctctgatggaaactaagctgaagggtggcgctggtgctttcgctacctccgagactcacttcggcaactacgtcgtgggagagatcatccccctgcagcagtccatgctgttcaacagctaagagctcaagcttgtcgagaagtactagaggatcataatcagccataccacatttgtagaggttttacttgctttaaaaaacctcccacacctccccctgaacctgaaacataaaatgaatgcaattgttgttgttaacttgtttattgcagcttataatggttacaaataaagcaatagcatcacaaatttcacaaataaagcatttttttcactgcattctagttgtggtttgtccaaactcatcaatgtatcttatcatgtctggatctgatcactgcttgagcctagaagatccggctgctaacaaagcccgaaaggaagctgagttggctgctgtggctagctttgtttaactttaagaaggagatacatctagacctgcaggccggaatattaatagatcatggagataattaaaatgataaccatctcgcaaataaataagtattttactgttttcgtaacagttttgtaataaaaaaacctataaatattccggattattcataccgtcccaccatcgggcgcggatcccggtccgaagcgcgcggaattcgccaccatgaccatggacgagcagcagccccaggctgtgacccccgtgtacgtgggcggtttcctggctcgttacgaccagtcccccgacgaggctgagctgctgctgccacgtgacgtggtcgaacactggctgcacgctcagggccagggacagccttccctgtccgtggctctgcccctgaacatcaaccacgacgacaccgctgtcgtgggtcacgtggccgctatgcagtccgtgcgtgacggcctgttctgcctgggttgcgtgacctccccccgtttcctggaaatcgtgcgtcgtgcttccgagaagtccgagctggtgtcccgtggtcccgtgtccccactgcagcccgacaaggtggtcgagttcctgtccggttcctacgctggcctgtccctgtcatcccgtcgttgcgacgacgtcgaggctgctacctccctgagcggctccgagactacccccttcaagcacgtggccctgtgctccgtgggtcgtaggcgtggaaccctggctgtgtacggtcgtgaccccgagtgggtcacccagcgtttccccgacctgaccgctgctgaccgtgacggactgcgtgctcagtggcagcgttgcggttccaccgctgtggacgcttccggcgaccccttccgttccgactcctacggcctgctgggcaactccgtggacgctctgtacatccgcgagcgtctgcccaagctgcgttacgacaagcagctcgtgggtgtcaccgagcgcgagtcctacgtgaaggcttccgtgtcccccgaggctgcttgcgacatcaaggctgcttccgctgagcgttctggcgacagccgctcccaggctgctactcctgctgctggtgctcgtgtgccctccagctccccatccccacctgtcgagcctccctcccccgtgcaacctcctgctctgcctgcttccccctccgtgctgcctgctgagtccagcccctccctgtcaccctctgagcctgctgaggctgcctccatgtcccaccctctgagcgctgctgtgactgctgctaccgctccccctggtgctactgtggctggtgcttcccccgctgtgccttccctggcttggcctcacgacggtgtctacctgcccaaggacgctttcttctccctgctgggcgcttcccgttccgctgctcccgtgatgtaccccggtgctgtggctgctccccccagcgcttcacctgctcctctgcccctgccctcctaccccgcttcctacggtgctcccgtcgtgggttacgaccagctggctgctcgtcacttcgctgactacgtggacccccactaccccggctggggtcgtcgttacgagcccgctccttccctgcacccatcctaccctgtgccccctcctccatcacccgcttactaccgtcgtcgtgactcccccggtggcatggacgagcctccatctggatgggagcgttacgacggttcccaccgtggccagtcccaaaagcagcaccgtcacggtggttccggtggtcacaacaagcgtcgcaaggaagccgctgctgcatcctccagctccgacgaggacctgagcttccccggcgaggctgaacacggtcgtgctcgcaagcgtctgaagtcccacgtgaactccgacggaggtagcggaggccacgctggttccaaccagcagcagcaacagcgctacgacgagctgcgtgacgctatccacgagctgaagcgtgacctgttcgctgctcgccagtcctccaccctgctgtctgctgctctgccagctgccgcttcttcctcccctaccaccaccaccgtgtgcacccctactggcgagctgacctctggtggtggcgagactcccaccgctctgctgtccggtggtgctaaggtggccgagcgtgctcaggctggtgtcgtgaacgcttcctgccgtctggctaccgcttccggttccgaggctgccaccgctggtccctctaccgctggttcctcatcctgcccagcttccgtggtgctggctgccgctgctgctcaagccgccgctgcttcacagtcccccccaaaggatatggtggacctgaaccgtcgtatcttcgtggctgctctgaacaagctcgagtaataaaagcttgtcgagaagtactagaggatcataatcagccataccacatttgtagaggttttacttgctttaaaaaacctcccacacctccccctgaacctgaaacataaaatgaatgcaattgttgttgttaacttgtttattgcagcttataatggttacaaataaagcaatagcatcacaaatttcacaaataaagcatttttttcactgcattctagttgtggtttgtccaaactcatcaatgtatcttatcatgtctggatctgatcactgcttgagcctagaagatccggctgctaacaaagcccgaaaggaagctgagttggctgctgccaccgctgagcaataactatcataacccctaggggcctctaaacgggtcttgaggggttttttgctgaaaggaggaactatatccggatctgaacaggagggacagctgatagaaacagaagccactggagcacctcaaaaacaccatcatacactaaatcagtaagttggcagcatcacccgacgcactttgcgccgaataaatacctgtgacggaagatcacttcgcagaataaataaatcctggtgtccctgttgataccgggaagccctgggccaacttttggcgaaaatgagacgttgatcggcacgtaagaggttccaactttcaccataatgaaataagatcactaccgggcgtattttttgagttatcgagattttcaggagctaaggaagctaaaatggagaaaaaaatcactggatataccaccgttgatatatcccaatggcatcgtaaagaacattttgaggcatttcagtcagttgctcaatgtacctataaccagaccgttcagctggatattacggcctttttaaagaccgtaaagaaaaataagcacaagttttatccggcctttattcacattcttgcccgcctgatgaatgctcatccggaattccgtatggcaatgaaagacggtgagctggtgatatgggatagtgttcacccttgttacaccgttttccatgagcaaactgaaacgttttcatcgctctggagtgaataccacgacgatttccggcagtttctacacatatattcgcaagatgtggcgtgttacggtgaaaacctggcctatttccctaaagggtttattgagaatatgtttttcgtctcagccaatccctgggtgagtttcaccagttttgatttaaacgtggccaatatggacaacttcttcgcccccgttttcaccatgggcaaatattatacgcaaggcgacaaggtgctgatgccgctggcgattcaggttcatcatgccgtttgtgatggcttccatgtcggcagaatgcttaatgaattacaacagtactgcgatgagtggcagggcggggcgtaatttttttaaggcagttattggtgcccttaaacgcctggttgctacgcctgaataagtgataataagcggatgaatggcagaaattcgaaagcaaattcgacccggtcgtcggttcagggcagggtcgttaaatagccgcttatgtctattgctggtttaccggtttattgactaccggaagcagtgtgaccgtgtgcttctcaaatgcctgaggccagtttgctcaggctctccccgtggaggtaataattgacgatatgatcatttattctgcctcccagctgacattcatccggggtcagcaccgtttctgcggactggctttctacgtgttccgcttcctttagcagcccttgcgccctgagtgcttgcggcagcgtgaagct

SEQ ID NO: 88 - DNA, 5016 bp, Artificial Sequence
  Synthetic construct
aattctgtcagccgttaagtgttcctgtgtcactcaaaattgctttgagaggctctaagggcttctcagtgcgttacatccctggcttgttgtccacaaccgttaaaccttaaaagctttaaaagccttatatattcttttttttcttataaaacttaaaaccttagaggctatttaagttgctgatttatattaattttattgttcaaacatgagagcttagtacgtgaaacatgagagcttagtacgttagccatgagagcttagtacgttagccatgagggtttagttcgttaaacatgagagcttagtacgttaaacatgagagcttagtacgtgaaacatgagagcttagtacgtactatcaacaggttgaactgctgatcaacagatcctctacgcggccgcggtaccataacttcgtatagcatacattatacgaagttatctggtttaaacgtacccgtagtggctatggcagggcttgccgccccgacgttggctgcgagccctgggccttcacccgaacttgggggttggggtggggaaaaggaagaaacgcgggcgtattggtcccaatggggtctcggtggggtatcgacagagtgccagccctgggaccgaaccccgcgtttatgaacaaacgacccaacacccgtgcgttttattctgtctttttattgccgtcatagcgcgggttccttccggtattgtctccttccgtgtttcagttagcctcccccatctcccggtaccgcatgctatgcatcagctgctagcaccatggctcgagatcccgggtgatcaagtcttcgtcgagtgattgtaaataaaatgtaatttacagtatagtattttaattaatatacaaatgatttgataataattcttatttaactataatatattgtgttgggttgaattaaaggtccgtatactagtatcgattcgcgacctactccggaatattaatagatcatggagataattaaaatgataaccatctcgcaaataaataagtattttactgttttcgtaacagttttgtaataaaaaaacctataaatattccggattattcataccgtcccaccatcgggcgcggatccgccaccatggccccctcccacgtggacaaggtgaacacccgcacctggtccgcctccatcgtgttcatggtgctgaccttcgtgaacgtgtccgtgcacctggtgctgtccaacttcccccacctgggctacccctgcgtgtactaccacgtggtggacttcgagcgcctgaacatgtccgcctacaacgtgatgcacctgcacacccccatgctgttcctggactccgtgcagctggtgtgctacgccgtgttcatgcagctggtgttcctggccgtgaccatctactacctggtgtgctggatcaagatctccatgcgcaaggacaagggcatgtccctgaaccagtccacccgcgacatctcctacatgggcgactccctgaccgccttcctgttcatcctgtccatggacaccttccagctgttcaccctgaccatgtccttccgcctgccctccatgatcgccttcatggccgccgtgcacttcttctgcctgaccatcttcaacgtgtccatggtgacccagtaccgctcctacaagcgctccctgttcttcttctcccgcctgcaccccaagctgaagggcaccgtgcagttccgcaccctgatcgtgaacctggtggaggtggccctgggcttcaacaccaccgtggtggccatggccctgtgctacggcttcggcaacaacttcttcgtgcgcaccggccacatggtgctggccgtgttcgtggtgtacgccatcatctccatcatctacttcctgctgatcgaggccgtgttcttccagtacgtgaaggtgcagttcggctaccacctgggcgccttcttcggcctgtgcggcctgatctaccccatcgtgcagtacgacaccttcctgtccaacgagtaccgcaccggcatctcctggtccttcggcatgctgttcttcatctgggccatgttcaccacctgccgcgccgtgcgctacttccgcggccgcggctccggctccgtgaagtaccaggccctggccaccgcctccggcgaggaggtggccgccctgtcccaccacgactccctggagtcccgccgcctgcgcgaggaggaggacgacgacgacgacgaggacttcgaggacgcctaagagctcaagcttgtcgagaagtactagaggatcataatcagccataccacatttgtagaggttttacttgctttaaaaaacctcccacacctccccctgaacctgaaacataaaatgaatgcaattgttgttgttaacttgtttattgcagcttataatggttacaaataaagcaatagcatcacaaatttcacaaataaagcatttttttcactgcattctagttgtggtttgtccaaactcatcaatgtatcttatcatgtctggatctgatcactgcttgagcctagaagatccggctgctaacaaagcccgaaaggaagctgagttggctgctgtggctagctttgtttaactttaagaaggagatacatctagaaatattaatagatcatggagataattaaaatgataaccatctcgcaaataaataagtattttactgttttcgtaacagttttgtaataaaaaaacctataaatattccggattattcataccgtcccaccatcgggcgcggatcccggtccgaagcgcgcggaattcaaaggcctacgccaccatggagtggaacacactagtactaggtcttttggttttatcggtagcggcaagttccaaccatacgtcgactgctagcacaccgagtccctctagctctactcacacctcaacgaccgtgaaggcaacgactactgcgacaactagtacaactacggtgacaagtacgacttcatcaacgactagtaccaaacccggttccaccactcacgaccccaatgtgatgagaccacatgctcacaatgatttttacaaggcgcattgtacatcgcatatgtatgaactttctctgtccagctttgcggcctggtggactatgcttaatgctctcattctcatgggagctttttgtatcgtactacgacattgctgtttccagaactttactgcaaccaccaccaaaggctattgataaaagcttgtcgagaagtactagagaagcttgtcgagaagtactagaggatcataatcagccataccacatttgtagaggttttacttgctttaaaaaacctcccacacctccccctgaacctgaaacataaaatgaatgcaattgttgttgttaacttgtttattgcagcttataatggttacaaataaagcaatagcatcacaaatttcacaaataaagcatttttttcactgcattctagttgtggtttgtccaaactcatcaatgtatcttatcatgtctggatctgatcactgcttgagcctagaagatccggctgctaacaaagcccgaaaggaagctgagttggctgctgccaccgctgagcaataactatcataacccctaggggcctctaaacgggtcttgaggggttttttgctgaaaggaggaactatatccggatctgaacaggagggacagctgatagaaacagaagccactggagcacctcaaaaacaccatcatacactaaatcagtaagttggcagcatcacccgacgcactttgcgccgaataaatacctgtgacggaagatcacttcgcagaataaataaatcctggtgtccctgttgataccgggaagccctgggccaacttttggcgaaaatgagacgttgatcggcacgtaagaggttccaactttcaccataatgaaataagatcactaccgggcgtattttttgagttatcgagattttcaggagctaaggaagctaaaatggagaaaaaaatcactggatataccaccgttgatatatcccaatggcatcgtaaagaacattttgaggcatttcagtcagttgctcaatgtacctataaccagaccgttcagctggatattacggcctttttaaagaccgtaaagaaaaataagcacaagttttatccggcctttattcacattcttgcccgcctgatgaatgctcatccggaattccgtatggcaatgaaagacggtgagctggtgatatgggatagtgttcacccttgttacaccgttttccatgagcaaactgaaacgttttcatcgctctggagtgaataccacgacgatttccggcagtttctacacatatattcgcaagatgtggcgtgttacggtgaaaacctggcctatttccctaaagggtttattgagaatatgtttttcgtctcagccaatccctgggtgagtttcaccagttttgatttaaacgtggccaatatggacaacttcttcgcccccgttttcaccatgggcaaatattatacgcaaggcgacaaggtgctgatgccgctggcgattcaggttcatcatgccgtttgtgatggcttccatgtcggcagaatgcttaatgaattacaacagtactgcgatgagtggcagggcggggcgtaatttttttaaggcagttattggtgcccttaaacgcctggttgctacgcctgaataagtgataataagcggatgaatggcagaaattcgaaagcaaattcgacccggtcgtcggttcagggcagggtcgttaaatagccgcttatgtctattgctggtttaccggtttattgactaccggaagcagtgtgaccgtgtgcttctcaaatgcctgaggccagtttgctcaggctctccccgtggaggtaataattgacgatatgatcatttattctgcctcccagctgacattcatccggggtcagcaccgtttctgcggactggctttctacgtgttccgcttcctttagcagcccttgcgccctgagtgcttgcggcagcgtgaagct

SEQ ID NO: 89 - DNA, 6616 bp, Artificial Sequence
  Synthetic construct
ttgttccagtttggaacaagagtccactattaaagaacgtggactccaacgtcaaagggcgaaaaaccgtctatcagggcgatggcccactacgtgaaccatcaccctaatcaagttttttggggtcgaggtgccgtaaagcactaaatcggaaccctaaagggagcccccgatttagagcttgacggggaaagccggcgaacgtggcgagaaaggaagggaagaaagcgaaaggagcgggcgctagggcgctggcaagtgtagcggtcacgctgcgcgtaaccaccacacccgccgcgcttaatgcgccgctacagggcgcgtcgcgccattcgccattcaggctgcgcaactgttgggaagggcgatcggtgcgggcctcttcgctattacgccagctggcgaaagggggatgtgctgcaaggcgattaagttgggtaacgccagggttttcccagtcacgacgttgtaaaacgacggccagtgcatagaccagccgcgtaacctggcaaaatcggttacggttgagtaataaatggatgccctgcgtaagcgggtgtgggcggacaataaagtcttaaactgaacaaaatagatctaaactatgacaataaagtcttaaactagacagaatagttgtaaactgaaatcagtccagttatgctgtgaaaaagcatactggacttttgttatggctaaagcaaactcttcattttctgaagtgcaaattgcccgtcgtattaaagaggggcgtggccaagggcatggtaaagactatattcgcggcgttgtgacaatttaccgaacaactccgcggccgggaagccgatctcggcttgaacgaattgttaggtggcggtacttgggtcgatatcaaagtgcatcacttcttcccgtatgcccaactttgtatagagagccactgcgggatcgtcaccgtaatctgcttgcacgtagatcacataagcaccaagcgcgttggcctcatgcttgaggagattgatgagcgcggtggcaatgccctgcctccggtgctcgccggagactgcgagatcatagatatagatctcactacgcggctgctcaaacttgggcagaacgtaagccgcgagagcgccaacaaccgcttcttggtcgaaggcagcaagcgcgatgaatgtcttactacggagcaagttcccgaggtaatcggagtccggctgatgttgggagtaggtggctacgtctccgaactcacgaccgaaaagatcaagagcagcccgcatggatttgacttggtcagggccgagcctacatgtgcgaatgatgcccatacttgagccacctaactttgttttagggcgactgccctgctgcgtaacatcgttgctgctgcgtaacatcgttgctgctccataacatcaaacatcgacccacggcgtaacgcgcttgctgcttggatgcccgaggcatagactgtacaaaaaaacagtcataacaagccatgaaaaccgccactgcgccgttaccaccgctgcgttcggtcaaggttctggaccagttgcgtgagcgcatacgctacttgcattacagtttacgaaccgaacaggcttatgtcaactgggttcgtgccttcatccgtttccacggtgtgcgtcacccggcaaccttgggcagcagcgaagtcgaggcatttctgtcctggctggcgaacgagcgcaaggtttcggtctccacgcatcgtcaggcattggcggccttgctgttcttctacggcaaggtgctgtgcacggatctgcccttgcttcaggagatcggtagacctcggccgtcgcggcgcttgccggtggtgctgaccccggatgaagtggttcgcatcctcggttttctggaaggcgagcatcgtttgttcgcccaggactctagctatagttctagtggttggctacagctttgtttgtactatcaacaggttgaactgctgatcaacagatcctctacgcggccgcggtaccataacttcgtatagcatacattatacgaagttatctggtttaaacgtacccgtagtggctatggcagggcttgccgccccgacgttggctgcgagccctgggccttcacccgaacttgggggttggggtggggaaaaggaagaaacgcgggcgtattggtcccaatggggtctcggtggggtatcgacagagtgccagccctgggaccgaaccccgcgtttatgaacaaacgacccaacacccgtgcgttttattctgtctttttattgccgtcatagcgcgggttccttccggtattgtctccttccgtgtttcagttagcctcccccatctcccggtaccgcatgctatgcatcagctgctagcaccatggctcgagatcccgggtgatcaagtcttcgtcgagtgattgtaaataaaatgtaatttacagtatagtattttaattaatatacaaatgatttgataataattcttatttaactataatatattgtgttgggttgaattaaaggtccgtatactagtatcgattcgcgacctactccggaatattaatagatcatggagataattaaaatgataaccatctcgcaaataaataagtattttactgttttcgtaacagttttgtaataaaaaaacctataaatattccggattattcataccgtcccaccatcgggcgcggatcccggtccgaagcgcgcggaattcgccaccatgggccagaccgttaccactcccttgagtttgaccctggatcactggaaggacgtcgagaggatcgctcacaaccagtccgtagatgtcaagaagaggcgttgggttaccttctgcagtgcggaatggccgacctttaacgtcggctggcctagagacggcaccttcaacagggacctgatcacgcaggtgaagatcaaagtgttctcacctggccctcatggacaccccgatcaagtcccctacatcgtgacctgggaagcactggcttttgatccacctccctgggccaagcccttcgtacaccctaaacctccgcctccacttcctccatctgctccctctctgccacttgaaccacctctttcgacaccgagtcgcagctccctttatcctgcactcactccttctctgggcgccaagccgaagcctcaagtactctctgacagcgagggtcccctgattgacttgctgacggaagatcccccgccttatagagaccccagaccacccccttcagacggtgacggaaattcgggagaagcgactcctgccggagaagctccagacccctcaccaatggcctctcgcttgcgtggtagacgcgaaccccctgtggcggactccactacctcgcaagcattcccactgcgcacaggaggcaacggacagctgcaatactggccattctcctcaagcgacctctacaactggaagaacaacaatcccagcttctcggaggaccctggtaaactgacagcgctgatcgaatccgtcctcatcacacatcagcccacctgggacgactgtcaacagctgttgggaacgctgcttaccggagaagagaagcagcgcgtgctcttggaggctagaaaagcggtgagaggcgatgatggacgcccgacacaactgccgaacgaagtagatgccgcttttcccctggaacgcccagactgggaatacactacccaggcaggtaggaaccacctcgtccaataccgccaattgctcctggctggtctccaaaacgctggcagatcaccgaccaatttggcgaaggtgaagggaatcacgcagggacctaatgagtctccgagcgctttcctggagagacttaaggaggcctaccgcagatacacaccctacgaccctgaggacccaggacaagaaacgaacgtggctatgtccttcatttggcagtctgccccagacattggcagaaagctggagaggctggaagatctcaagaacaagacgctcggagatctggtcagagaggctgagaggatcttcaacaagcgagagacaccggaggaaagggaggaacgtatcaggcgagagaccgaggaaaaggaggaacgacgcaggacagaggacgagcagaaagagaaagagcgcgaccgtagacgccatagggagatgagcaagctgcttgccactgtcgtgagtggacagagacaggatagacagggtggcgaacgcaggagatcccaactggatagagaccagtgtgcctactgcaaagagaagggacactgggctaaagactgtcccaagaaaccacgaggacctcgtggaccaagaccgcagacttccctcttgactctggatgaccagctgttgaattttgaccttcttaagcttgcgggagacgtcgagtccaaccctgggcccatggaatcccgtggtcgtcgttgccccgagatgatctccgtgctgggtcccatctccggtcacgtcctgaaggctgtgttctcccgtggcgacacccccgtgctgccccacgaaactcgtctgctgcagaccggtatccacgtgcgtgtgtcccagccctccctgatcctggtgtcccagtacacccccgactccaccccttgccaccgcggagacaaccagctgcaggtccagcacacctacttcaccggttccgaggtcgagaacgtgtccgtgaacgtgcacaaccccaccggtcgttccatctgcccctcccaagagcccatgtccatctacgtgtacgctctgcccctgaagatgctgaacatcccctccatcaacgtgcaccactacccctccgctgctgagcgcaagcaccgtcacctccccgtggctgacgctgtgatccacgcttccggcaagcagatgtggcaggctcgtctgaccgtgtccggcctggcttggacccgtcagcagaaccagtggaaggaacccgacgtgtactacacctccgctttcgtgttccccaccaaggacgtggccctgcgtcacgtcgtgtgcgctcacgaactcgtgtgctccatggaaaacacccgtgctaccaagatgcaagtgatcggcgaccagtacgtgaaggtgtacctggaatccttctgcgaggacgtgccctccggcaagctgttcatgcacgtgaccctgggttccgacgtggaagaggacctgaccatgacccgtaacccccagcccttcatgcgtccccacgagcgtaacggtttcaccgtgctgtgccccaagaacatgatcatcaagcccggcaagatctcccacatcatgctggacgtggccttcacctcccacgagcacttcggcctgctgtgccctaagtccatccccggcctgtccatctccggcaacctgctgatgaacggccagcagatcttcctggaagtgcaggctatccgtgaaaccgtcgagctgcgtcagtacgaccctgtggctgctctgttcttcttcgacatcgacctgctgctgcagcgtggtccccagtactccgagcaccccaccttcaccagccagtaccgtatccagggcaagctggaataccgtcacacctgggaccgtcacgacgagggtgctgctcagggcgacgacgacgtgtggacctccggttccgactccgacgaggaactggtcaccaccgagcgcaagaccccccgtgtgaccggtggtggtgctatggctggtgcttccacctccgctggtcgcaagcgcaagtccgcttcctccgctaccgcttgcaccgctggtgtcatgacccgtggtcgcctgaaggctgagtccaccgtggctcccgaagaggacactgacgaggactccgacaacgagatccacaaccccgctgtgttcacctggcccccctggcaggctggtatcctggctcgtaacctggtgcccatggtggctaccgtgcagggccagaacctgaagtaccaagagttcttctgggacgccaacgacatctaccgtatcttcgctgagctggaaggcgtgtggcagcccgctgctcagcccaagcgtcgtcgtcaccgtcaggacgctctgcctggtccctgtatcgcttccacccccaagaagcaccgcggctaaaagcttgtcgagaagtactagaggatcataatcagccataccacatttgtagaggttttacttgctttaaaaaacctcccacacctccccctgaacctgaaacataaaatgaatgcaattgttgttgttaacttgtttattgcagcttataatggttacaaataaagcaatagcatcacaaatttcacaaataaagcatttttttcactgcattctagttgtggtttgtccaaactcatcaatgtatcttatcatgtctggatctgatcactgcttgagcctagaagatccggctgctaacaaagcccgaaaggaagctgagttggctgctgccaccgctgagcaataactatcataacccctaggagatccgaaccagataagtgaaatctagttccaaactattttgtcatttttaattttcgtattagcttacgacgctacacccagttcccatctattttgtcactcttccctaaataatccttaaaaactccatttccacccctcccagttcccaactattttgtccgcccaca

SEQ ID NO: 90 - DNA, 25535 bp, Artificial Sequence
  Synthetic construct
ttgttccagtttggaacaagagtccactattaaagaacgtggactccaacgtcaaagggcgaaaaaccgtctatcagggcgatggcccactacgtgaaccatcaccctaatcaagttttttggggtcgaggtgccgtaaagcactaaatcggaaccctaaagggagcccccgatttagagcttgacggggaaagccggcgaacgtggcgagaaaggaagggaagaaagcgaaaggagcgggcgctagggcgctggcaagtgtagcggtcacgctgcgcgtaaccaccacacccgccgcgcttaatgcgccgctacagggcgcgtccattcgccattcaggctgcgcaactgttgggaagggcgatcggtgcgggcctcttcgctattacgccagctggcgaaagggggatgtgctgcaaggcgattaagttgggtaacgccagggttttcccagtcacgacgttgtaaaacgacggccagtgcatagaccagccgcgtaacctggcaaaatcggttacggttgagtaataaatggatgccctgcgtaagcgggtgtgggcggacaataaagtcttaaactgaacaaaatagatctaaactatgacaataaagtcttaaactagacagaatagttgtaaactgaaatcagtccagttatgctgtgaaaaagcatactggacttttgttatggctaaagcaaactcttcattttctgaagtgcaaattgcccgtcgtattaaagaggggcgtggccaagggcatggtaaagactatattcgcggcgttgtgacaatttaccgaacaactccgcggccgggaagccgatctcggcttgaacgaattgttaggtggcggtacttgggtcgatatcaaagtgcatcacttcttcccgtatgcccaactttgtatagagagccactgcgggatcgtcaccgtaatctgcttgcacgtagatcacataagcaccaagcgcgttggcctcatgcttgaggagattgatgagcgcggtggcaatgccctgcctccggtgctcgccggagactgcgagatcatagatatagatctcactacgcggctgctcaaacttgggcagaacgtaagccgcgagagcgccaacaaccgcttcttggtcgaaggcagcaagcgcgatgaatgtcttactacggagcaagttcccgaggtaatcggagtccggctgatgttgggagtaggtggctacgtctccgaactcacgaccgaaaagatcaagagcagcccgcatggatttgacttggtcagggccgagcctacatgtgcgaatgatgcccatacttgagccacctaactttgttttagggcgactgccctgctgcgtaacatcgttgctgctgcgtaacatcgttgctgctccataacatcaaacatcgacccacggcgtaacgcgcttgctgcttggatgcccgaggcatagactgtacaaaaaaacagtcataacaagccatgaaaaccgccactgcgccgttaccaccgctgcgttcggtcaaggttctggaccagttgcgtgagcgcatacgctacttgcattacagtttacgaaccgaacaggcttatgtcaactgggtttgtgccttcatccgtttccacggtgtgcgtcacccggcaaccttgggcagcagcgaagtcgaggcatttctgtcctggctggcgaacgagcgcaaggtttcggtctccacgcatcgtcaggcattggcggccttgctgttcttctacggcaaggtgctgtgcacggatctgcccttgcttcaggagatcggtagacctcggccgtcgcggcgcttgccggtggtgctgaccccggatgaagtggttcgcatcctcggttttctggaaggcgagcatcgtttgttcgcccaggactctagctatagttctagtggttggctacagctttgtttgtactatcaacaggttgaactgctgatcaacagatcctctacgcggccgcggtaccataacttcgtatagcatacattatacgaagttatctggtttaaacgtacccgtagtggctatggcagggcttgccgccccgacgttggctgcgagccctgggccttcacccgaacttgggggttggggtggggaaaaggaagaaacgcgggcgtattggtcccaatggggtctcggtggggtatcgacagagtgccagccctgggaccgaaccccgcgtttatgaacaaacgacccaacacccgtgcgttttattctgtctttttattgccgtcatagcgcgggttccttccggtattgtctccttccgtgtttcagttagcctcccccatctcccggtaccgcatgctatgcatcagctgctagcttactgcagccaccaccacagggagttcagggtggacaggttcacagcacgacggtgctcagggggggtcaggttgccgtaggtggaggactgcaggctgaagttacggatctcagacaggaacagcagggagtccaggtagtcccacatggggtcgatgaaggtgcgctggaaacgggtggatggggaggtgggggtggtcttgttgttgtcggaagcagtctcgttctcgacgggcatggtgtcgttgtagtacagggaggacatgtccagggtgccgtagatggtgtagggagtctcgttacggatcagcacgtgagtgttcttcatgaactcggacacagcggtacggttacggttgggcttgcagaagggctcgtcacggtaacgcagggtggtgtacacccaggtagccaggtccttcagctgagtggtcaggatagacttcatgaagttctcgtcgggacggtaaccgatggtagaggtggggatacgggtgggcacgatgggggagtaggtcacgttggtggaaacgttgaagatggtggaggtgtaggaggagtagggggtagtagtgctgacgcgggacttcttggagatggacttcacgggagcctgcttgcgcttcagcttgcgcatggtgttcttcagcttggtggagttgatgtacttgggcacacggaagatgttacgggacatagcgttgaccaggtagaaggaacgggtgcagttgcgctgagcgtaacgcagcagcagagcagccaggcccaggaagtagatagtctgggagtccacgttgaccttggaggggcccacgtacagcttggtgttccaacggggcacgttgaagaacatggggttgaaggtggtgaagttgccgcagttttcctcgccggtgttgttacgacgggacacgttcagcatctcggacaggcaggtcatggaggggatggtgccgcaagaggggggacggaaggtgatcttctggccggtgtggttgtactcggagtacacgtacttagcgggcttgcgcagctgggtggtgtggaagtcgaaccacaggtgggtgatggagtggttacggatgggaccagccaggatggagttgggggggaactgcttcatctcgacggtgatgttgtacagcttctgctggctggggaaggtgaagaacttgtagtagtcgccggtcttggaagccagctcttgcaggatacgcagcttcagctggcgttcctcttccttagccttctgggacttcacacggaaacgagccacagcgatcttgcagttgatgaagctgaacagcaggaaggtcagggacatcaggaagaacaggttgaacacgccacgcatctcgcccttgcgacccatggtggcctcgagatcccgggtgatcaagtcttcgtcgagtgattgtaaataaaatgtaatttacagtatagtattttaattaatatacaaatgatttgataataattcttatttaactataatatattgtgttgggttgaattaaaggtccgtatactagtatcgattcgcgacctactccggaatattaatagatcatggagataattaaaatgataaccatctcgcaaataaataagtattttactgttttcgtaacagttttgtaataaaaaaacctataaatattccggattattcataccgtcccaccatcgggcgcggatccgccaccatggaaaactggtccgctctggaactgctgcccaaggtcggaatccctaccgacttcctgacccacgtcaagacctccgctggcgaggaaatgttcgaggctctgaggatctactacggcgacgaccccgagcgttacaacatccacttcgaggctatcttcggcaccttctgcaaccgtctggaatgggtgtacttcctgacttccggcctggctgctgctgctcacgctatcaagttccacgacctgaacaagctgaccaccggcaagatgctgttccacgtgcaagtgccccgtgtggcttccggtgctggcctgcctacctcccgtcagaccaccatcatggtcaccaagtactccgagaagtcccccatcaccatccctttcgagctgtccgctgcttgcctgacttacctgcgtgaaaccttcgagggcaccatcctggacaagatcctgaacgtcgaggctatgcacaccgtgctgcgtgctctgaagaacaccgctgacgctatggaacgtggcctgatccacagcttcctccagaccctgctgaggaaggctcccccctacttcgtggtgcagaccctggtcgagaacgctaccctggctcgtcaggctctgaaccgtatccagcgctccaacatcctgcagtccttcaaggctaagatgctggctaccctgttcctgctgaaccgtacccgtgaccgtgactacgtgctgaagttcctgacccgtctggctgaggctgctaccgactccatcctcgacaaccctactacctacaccacctcctccggtgctaagatctccggtgtcatggtgtccaccgctaacgtgatgcagatcatcatgtccctgctgtcctcccacatcactaaggaaaccgtgtccgctcccgctacctacggcaacttcgtgctgtcccccgagaacgctgtgaccgctatctcctaccactctatcctggctgacttcaactcctacaaggctcacctgacctccggccagccccacctccccaacgactccctgagccaggctggtgctcactccctgacccccctgtccatggacgtgatccgtctgggcgaaaagaccgtgatcatggaaaacctgcgtcgcgtgtacaagaacaccgacaccaaggaccccctggaacgtaacgtggacctgaccttcttcttccccgtgggcctgtacctgcccgaggaccgtggttacaccaccgtcgagtccaaggtcaagctgaacgacaccgtgcgtaacgctctgcccaccaccgcttacctgctgaacagggaccgtgctgtgcaaaagatcgacttcgtggacgctctcaagaccctgtgccaccccgtgctgcacgagcctgctccatgcctgcaggctttcaccgagcgtggtcccccatccgagcccgctatgcagcgtctgctggaatgccgtttccagcaagagcccatgggtggtgctgctcgtcgtatcccccacttctaccgtgtgcgccgcgaggtgccccgtaccgtgaacgagatgaagcaggacttcgtggtcaccgacttctacaaggttggaaacatcaccctgtacaccgagctgcaccctttcttcgacttcacccactgccaagagaactccgagactgtggctctgtgcaccccccgtatcgtgatcggcaacctgcccgacggcctggctcccggtcccttccacgagctgaggacctgggagatcatggaacacatgcgcctgcgtcccccacccgactacgaggaaaccctgcgtctgttcaagaccaccgtgacctcccccaactaccccgagctgtgctacctggtggacgtgctggtgcacggcaacgctgacgctttcctgctgatccgcgctttcatcgctcgttgcatcgtgaacatgttccacacccgtcagctgctggtgttcgctcactcctacgctctggtcaccctgatcgctgagcacctggctgacggtgctctgcccccccagctcctgttccactaccgtaacctggtggctgtgctgcgcctggtcacccgtatctccgctctgcccggcctgaacaacggccagctggctgaggaacccctgtccgcttacgtgaacgctctgcacgaccacaggctgtggccccccttcgtgacccacctccctcgtaacatggaaggtgtccaggtggtggctgatcgtcagcccctgaaccccgctaacatcgaggctcgtcaccacggtgtctccgacgtgccccgtctgggtgctatggacgctgacgagcccctgttcgtggacgactaccgtgctaccgacgacgagtggaccctgcaaaaggtgttctacctgtgcctgatccccgctatgaccaacaaccgtgcttgcggcctgggcctgaacctcaagactctgctggtggacctgttctaccgtcccgccttcctgctcatgcccgctgctaccgctgtgtccacctccggcaccacctccaaggaatccacctctggtgtcacccccgaggactccgtggctgctcagcgtcaggctgtgggcgagatgctgaccgagctggtcgaggacgtggccaccgacgctcacacccctctgctgcaggcttgccgcgagctgttcctggctgtgcagttcgtgggcgagcacgtgaaggtgctggaagtgcgtgctcccctggaccacgctcagaggcagggactgcccgacttcatctcccgtcagcatgtgctgtacaacggttgctgcgtcgtgaccgctcctaagaccctgatcgagtactccctgcccgtgcccttccaccgtttctactccaaccccaccatctgcgctgctctgtccgacgacatcaagcgttacgtgaccgagttcccccactaccatagacacgatggtggtttccccctgcccaccgctttcgctcacgagtaccacaactggctgcgtagccccttctcccgttactccgctacctgccccaacgtgctgcactccgtgatgaccctggctgctatgctgtacaagatctcccccgtgtccctggtgctgcagaccaaggctcacatccaccccggtttcgctctgaccgctgtgcgtaccgacaccttcgaggtggacatgctgctgtactccggcaagtcctgcacctccgtcatcatcaacaaccccatcgtgaccaaggaagagagggacatctccaccacctaccacgtgacccagaacatcaacaccgtggacatgggcctgggttacacctccaacacttgcgtggcctacgtgaaccgcgtccgcaccgacatgggtgtccgtgtgcaggacctgttccgtgtgttccccatgaacgtgtaccgccacgatgaggtggaccgttggatcaggcacgctgctggcgtcgagcgtccccagctgctggacaccgagactatctccatgctgaccttcggttccatgtccgagcgcaacgctgctgctaccgtgcacggccagaaggctgtctgcgagctgatcctgacccctgtgactatggacgtgaactacttcaagatcaccaacaaccctcgtggtcgtgcttcctgcatgctgggcgtggacccctacgacaccgaggctgccaccaaggctatctacgaccaccgcgaggctgacgctcagaccttcgctgctacccacaacccatgggcttcccaggctggttgcctgtccgacgtcctgtacaacacccgtcaccgcgagcgtctgggctacaactccaagttctactccccctgcgctcagtacttcaacaccgaggaaatcatcgctgccaacaagaccctcttcaagaccatcgacgagtacctgctgcgcgctaaggactgcatccgtggcgacaccgacactcagtacgtgtgcgtcgagggaaccgagcagctgatcgagaacccttgccgtctgacccaagaggctctgcccatcctgtccaccaccaccctggctctgatggaaactaagctgaagggtggcgctggtgctttcgctacctccgagactcacttcggcaactacgtcgtgggagagatcatccccctgcagcagtccatgctgttcaacagctaagagctcaagcttgtcgagaagtactagaggatcataatcagccataccacatttgtagaggttttacttgctttaaaaaacctcccacacctccccctgaacctgaaacataaaatgaatgcaattgttgttgttaacttgtttattgcagcttataatggttacaaataaagcaatagcatcacaaatttcacaaataaagcatttttttcactgcattctagttgtggtttgtccaaactcatcaatgtatcttatcatgtctggatctgatcactgcttgagcctagaagatccggctgctaacaaagcccgaaaggaagctgagttggctgctgtggctagctttgtttaactttaagaaggagatacatctagaaatattaatagatcatggagataattaaaatgataaccatctcgcaaataaataagtattttactgttttcgtaacagttttgtaataaaaaaacctataaatattccggattattcataccgtcccaccatcgggcgcggatccgccaccatggctgctatggaagctaacatcttctgcaccttcgaccacaagctgtctatcgctgacgtgggcaagctgaccaagctggtggctgctgtggtgcccatcccccagcgtctgcacctgatcaagcactaccagctgggcctgcaccagttcgtggaccacacccgtggttacgtgcgtctgcgtggcctgctgcgtaacatgaccctgaccctgatgcgtcgtgtcgagggcaaccagatcctgctgcacgtgcccacccacggcctgctgtacaccgtgctgaacaccggtcccgtgacctgggagaagggcgacgctctgtgcgtgctgccccccctgttccacggtcccctggctcgtgaaaacctgttgaccctgggccagtgggagctggtgctgccctggatcgtgcccatgcccctggctctggaaatcaaccagcgcctgctgatcatgggcctgttctccctggaccgttcctacgaagaagtgaaggctgctgtccagcagctgcagaccatcaccttccgtgacgctaccttcaccatccccgaccccgtgatcgaccagcacctcctgatcgacatgaagaccgcttgcctgtccatgtccatggtggctaacctggcttccgagctgaccatgacctacgtccgcaagctggctttggaggactcttccatgctgctggtcaagtgccaagagctgctgatgcgtctggaccgcgagcgttccgtgggcgagcctcgtactcccgctcgtcctcagcacgtgtcccccgacgacgagatcgctcgtctgtccgctctgttcgtgatgctgcgtcagctggacgacctgatccgcgagcaggtcgtgttcaccgtgtgcgacgtgagcccagacaacaagtccgctacctgcatcttcaagggctaaggcgcgccaagcttgtcgagaagtactagaggatcataatcagccataccacatttgtagaggttttacttgctttaaaaaacctcccacacctccccctgaacctgaaacataaaatgaatgcaattgttgttgttaacttgtttattgcagcttataatggttacaaataaagcaatagcatcacaaatttcacaaataaagcatttttttcactgcattctagttgtggtttgtccaaactcatcaatgtatcttatcatgtctggatctgatcactgcttgagcctagaagatccggctgctaacaaagcccgaaaggaagctgagttggctgctgggtgcctaatgagtgagctaactcacattaattgcccggaatattaatagatcatggagataattaaaatgataaccatctcgcaaataaataagtattttactgttttcgtaacagttttgtaataaaaaaacctataaatattccggattattcataccgtcccaccatcgggcgcggatcccggtccgaagcgcgcggaattcaaaggcctacgtcgacgccaccatgtccaacaccgctcccggtcccaccgtggctaacaagcgtgacgagaagcaccgtcacgtggtcaacgtggtgctcgagctgcccaccgagatctccgaggctacccaccccgtgctggctaccatgctgtccaagtacacccgtatgtcctccctgttcaacgacaagtgcgctttcaagctggacctgctgcgtatggtggctgtgtcccgtacccgtcgctaaaagcttgtcgagaagtactagaggatcataatcagccataccacatttgtagaggttttacttgctttaaaaaacctcccacacctccccctgaacctgaaacataaaatgaatgcaattgttgttgttaacttgtttattgcagcttataatggttacaaataaagcaatagcatcacaaatttcacaaataaagcatttttttcactgcattctagttgtggtttgtccaaactcatcaatgtatcttatcatgtctggatctgatcactgcttgagcctagaagatccggctgctaacaaagcccgaaaggaagctgagttggctgctgggtgcctaatgagtgagctaactcacattaattgcccggaatattaatagatcatggagataattaaaatgataaccatctcgcaaataaataagtattttactgttttcgtaacagttttgtaataaaaaaacctataaatattccggattattcataccgtcccaccatcgggcgcggatcccggtccgaagcgcgcggaattcaaaggcctacgtcgacgccaccatggaatcccgtggtcgtcgttgccccgagatgatctccgtgctgggtcccatctccggtcacgtcctgaaggctgtgttctcccgtggcgacacccccgtgctgccccacgaaactcgtctgctgcagaccggtatccacgtgcgtgtgtcccagccctccctgatcctggtgtcccagtacacccccgactccaccccttgccaccgcggagacaaccagctgcaggtccagcacacctacttcaccggttccgaggtcgagaacgtgtccgtgaacgtgcacaaccccaccggtcgttccatctgcccctcccaagagcccatgtccatctacgtgtacgctctgcccctgaagatgctgaacatcccctccatcaacgtgcaccactacccctccgctgctgagcgcaagcaccgtcacctccccgtggctgacgctgtgatccacgcttccggcaagcagatgtggcaggctcgtctgaccgtgtccggcctggcttggacccgtcagcagaaccagtggaaggaacccgacgtgtactacacctccgctttcgtgttccccaccaaggacgtggccctgcgtcacgtcgtgtgcgctcacgaactcgtgtgctccatggaaaacacccgtgctaccaagatgcaagtgatcggcgaccagtacgtgaaggtgtacctggaatccttctgcgaggacgtgccctccggcaagctgttcatgcacgtgaccctgggttccgacgtggaagaggacctgaccatgacccgtaacccccagcccttcatgcgtccccacgagcgtaacggtttcaccgtgctgtgccccaagaacatgatcatcaagcccggcaagatctcccacatcatgctggacgtggccttcacctcccacgagcacttcggcctgctgtgccctaagtccatccccggcctgtccatctccggcaacctgctgatgaacggccagcagatcttcctggaagtgcaggctatccgtgaaaccgtcgagctgcgtcagtacgaccctgtggctgctctgttcttcttcgacatcgacctgctgctgcagcgtggtccccagtactccgagcaccccaccttcaccagccagtaccgtatccagggcaagctggaataccgtcacacctgggaccgtcacgacgagggtgctgctcagggcgacgacgacgtgtggacctccggttccgactccgacgaggaactggtcaccaccgagcgcaagaccccccgtgtgaccggtggtggtgctatggctggtgcttccacctccgctggtcgcaagcgcaagtccgcttcctccgctaccgcttgcaccgctggtgtcatgacccgtggtcgcctgaaggctgagtccaccgtggctcccgaagaggacactgacgaggactccgacaacgagatccacaaccccgctgtgttcacctggcccccctggcaggctggtatcctggctcgtaacctggtgcccatggtggctaccgtgcagggccagaacctgaagtaccaagagttcttctgggacgccaacgacatctaccgtatcttcgctgagctggaaggcgtgtggcagcccgctgctcagcccaagcgtcgtcgtcaccgtcaggacgctctgcctggtccctgtatcgcttccacccccaagaagcaccgcggctaaaagcttgtcgagaagtactagaggatcataatcagccataccacatttgtagaggttttacttgctttaaaaaacctcccacacctccccctgaacctgaaacataaaatgaatgcaattgttgttgttaacttgtttattgcagcttataatggttacaaataaagcaatagcatcacaaatttcacaaataaagcatttttttcactgcattctagttgtggtttgtccaaactcatcaatgtatcttatcatgtctggatctgatcactgcttgagcctagaagatccggctgctaacaaagcccgaaaggaagctgagttggctgctgccaccgctgagcaataactatcataacccctaggggcctctaaacgggtcttgaggggttttttgctgaaaggaggaactatatccggatctgaacaggagggacagctgatagaaacagaagccactggagcacctcaaaaacaccatcatacactaaatcagtaagttggcagcatcacccgacgcactttgcgccgaataaatacctgtgacggaagatcacttcgcagaataaataaatcctggtgtccctgttgataccgggaagccctgggccaacttttggcgaaaatgagacgttgatcggcacgtaagaggttccaactttcaccataatgaaataagatcactaccgggcgtattttttgagttatcgagattttcaggagctaaggaagctaaaatggagaaaaaaatcactggatataccaccgttgatatatcccaatggcatcgtaaagaacattttgaggcatttcagtcagttgctcaatgtacctataaccagaccgttcagctggatattacggcctttttaaagaccgtaaagaaaaataagcacaagttttatccggcctttattcacattcttgcccgcctgatgaatgctcatccggaattccgtatggcaatgaaagacggtgagctggtgatatgggatagtgttcacccttgttacaccgttttccatgagcaaactgaaacgttttcatcgctctggagtgaataccacgacgatttccggcagtttctacacatatattcgcaagatgtggcgtgttacggtgaaaacctggcctatttccctaaagggtttattgagaatatgtttttcgtctcagccaatccctgggtgagtttcaccagttttgatttaaacgtggccaatatggacaacttcttcgcccccgttttcaccatgggcaaatattatacgcaaggcgacaaggtgctgatgccgctggcgattcaggttcatcatgccgtttgtgatggcttccatgtcggcagaatgcttaatgaattacaacagtactgcgatgagtggcagggcggggcgtaatttttttaaggcagttattggtgcccttaaacgcctggttgctacgcctgaataagtgataataagcggatgaatggcagaaattcgaaagcaaattcgacccggtcgtcggttcagggcagggtcgttaaatagccgcttatgtctattgctggtttaccggtttattgactaccggaagcagtgtgaccgtgtgcttctcaaatgcctgaggccagtttgctcaggctctccccgtggaggtaataattgacgatatgatcatttattctgcctcccagctgacattcatccggggtcagcaccgtttctgcggactggctttctacgtgttccgcttcctttagcagcccttgcgccctgagtgcttgcggcagcgtgaagctaattctgtcagccgttaagtgttcctgtgtcactcaaaattgctttgagaggctctaagggcttctcagtgcgttacatccctggcttgttgtccacaaccgttaaaccttaaaagctttaaaagccttatatattcttttttttcttataaaacttaaaaccttagaggctatttaagttgctgatttatattaattttattgttcaaacatgagagcttagtacgtgaaacatgagagcttagtacgttagccatgagagcttagtacgttagccatgagggtttagttcgttaaacatgagagcttagtacgttaaacatgagagcttagtacgtgaaacatgagagcttagtacgtactatcaacaggttgaactgctgatcaacagatcctctacgcggccgcggtaccataacttcgtatagcatacattatacgaagttatctggtttaaacgtacccgtagtggctatggcagggcttgccgccccgacgttggctgcgagccctgggccttcacccgaacttgggggttggggtggggaaaaggaagaaacgcgggcgtattggtcccaatggggtctcggtggggtatcgacagagtgccagccctgggaccgaaccccgcgtttatgaacaaacgacccaacacccgtgcgttttattctgtctttttattgccgtcatagcgcgggttccttccggtattgtctccttccgtgtttcagttagcctcccccatctcccggtaccgcatgctatgcatcagctgctagcttagcgagcgtccacagcctggggaccgtaacgggagtgagcgggcaggttcacacgggtctgcttcagctcagggggcaggccagcgtagtacttgtccaggtgacgcagcaggggggggtccagctggtgacgcaggcagaattccttcacagcgttgtacaggccgtagaacagggtgataccctcgggagcagcagcggtggacacgggcagacgcacagcacggttggtacgggtagcctcgttacggatagccaccaccacgttgaacagggaggggggcaccagctcgaaacccagcacgtgttcggtgaagatggaacgaccgtaggacagacgagtcaggtcgtaaccacggcacaggtcgtccacgcaagtgtacacagcgggggaaccgtcgccgcactcggagtaaccgcgcatcacggtcatccaacggggagcggtgtcggaggacagcagggtcagcagagcacgcagctggtcggggttgttgtacagcagggccagggtgtccaggaaagcgtcgtccagcagcacggagttagcagcctcgggggtcacgggacggtaacggatcagctgggacaggggaccgtccctacgggtcacgttgaccaggggacgcagccaggactcgtacttgtcgccctggaacacctctcccagcaggcaacgacgggtcagctcggggcactcagcgggcaccttctcagccacggtgggagccacggacacggtagcggaggacacgatgggcagcagcaggcagcaccacagcagagccacgggaccgggggagaaggagaaaccgcagtcgggacgacggcacatggtggctcgagatcccgggtgatcaagtcttcgtcgagtgattgtaaataaaatgtaatttacagtatagtattttaattaatatacaaatgatttgataataattcttatttaactataatatattgtgttgggttgaattaaaggtccgtatactagtatcgattcgcgacctactccggaatattaatagatcatggagataattaaaatgataaccatctcgcaaataaataagtattttactgttttcgtaacagttttgtaataaaaaaacctataaatattccggattattcataccgtcccaccatcgggcgcggatccgccaccatgtcccccaagaacctgacccccttcctgaccgctctgtggctgctgctgggccactcccgtgtgcctcgtgtgcgtgctgaggaatgctgcgagttcatcaacgtgaaccacccccccgagcgctgctacgacttcaagatgtgcaaccgtttcaccgtggctctgcgttgccccgacggcgaagtgtgctactcccccgaaaagaccgctgagatccgtggtatcgtgaccaccatgacccactccctgacccgtcaggtggtgcacaacaagctgacctcttgcaactacaaccccctgtacctcgaggctgacggtcgtatccgttgcggcaaggtcaacgacaaggctcagtacctgctgggtgctgctggttccgtgccctaccgttggatcaacctcgagtacgacaagatcacccgtatcgtgggcctggaccagtacctcgagtccgtgaagaagcacaagcgtctggacgtgtgccgtgctaagatgggttacatgctgcagtaaaagcttgtcgagaagtactagaggatcataatcagccataccacatttgtagaggttttacttgctttaaaaaacctcccacacctccccctgaacctgaaacataaaatgaatgcaattgttgttgttaacttgtttattgcagcttataatggttacaaataaagcaatagcatcacaaatttcacaaataaagcatttttttcactgcattctagttgtggtttgtccaaactcatcaatgtatcttatcatgtctggatctgatcactgcttgagcctagaagatccggctgctaacaaagcccgaaaggaagctgagttggctgctgtggctagctttgtttaactttaagaaggagatacatctagaccggaatattaatagatcatggagataattaaaatgataaccatctcgcaaataaataagtattttactgttttcgtaacagttttgtaataaaaaaacctataaatattccggattattcataccgtcccaccatcgggcgcggatccgccaccatgctgcgtctgctgctgcgtcaccacttccactgcctgctgctgtgcgctgtgtgggctaccccctgcctggcttccccttggtccaccctgaccgctaaccagaacccctccccaccctggtccaagctgacctactccaagccccacgacgctgctaccttctactgccccttcctgtacccatccccccctcgttccccactgcagttctccggtttccagcgtgtgctgaccggtcccgagtgccgtaacgagactctgtacctgctgtacaaccgcgagggccagaccctggtcgagaggtcctccacctgggtcaagaaggtcatctggtacttgtccggtcgtaaccagaccatcctgcagcgtatgccccgtaccgcttccaagccctccgacggcaacgtgcagatctccgtcgaggacgctaagatcttcggtgctcacatggtgcccaagcagaccaagctgctgcgtttcgtggtcaacgacggcacccgttaccagatgtgcgtgatgaagctcgagtcctgggctcacgtgttccgtgactactccgtgtccttccaagtgcgcctgaccttcaccgaggctaacaaccagacctacaccttctgcacccaccccaacctgatcgtgtaaaagcttgtcgagaagtactagaggatcataatcagccataccacatttgtagaggttttacttgctttaaaaaacctcccacacctccccctgaacctgaaacataaaatgaatgcaattgttgttgttaacttgtttattgcagcttataatggttacaaataaagcaatagcatcacaaatttcacaaataaagcatttttttcactgcattctagttgtggtttgtccaaactcatcaatgtatcttatcatgtctggatctgatcactgcttgagcctagaagatccggctgctaacaaagcccgaaaggaagctgagttggctgctgggtgcctaatgagtgagctaactcacattaattgcccggaatattaatagatcatggagataattaaaatgataaccatctcgcaaataaataagtattttactgttttcgtaacagttttgtaataaaaaaacctataaatattccggattattcataccgtcccaccatcgggcgcggatccgccaccatgcgtctgtgccgtgtgtggctgtccgtgtgcctgtgcgctgtggtgctgggccagtgccagcgtgaaaccgctgagaagaacgactactaccgtgtgccccactactgggacgcttgctcccgtgctctgcccgaccagacccgttacaagtacgtcgagcagctggtggacctgaccctgaactaccactacgacgcttcccacggcctggacaacttcgacgtgctgaagcgtatcaacgtgaccgaggtgtccctgctgatctccgacttccgtcgtcagaaccgtcgtggtggcaccaacaagcgtaccaccttcaacgctgctggttccctggctccccacgctcgttccctcgagttctccgtgcgtctgttcgctaactaaaagcttgtcgagaagtactagaggatcataatcagccataccacatttgtagaggttttacttgctttaaaaaacctcccacacctccccctgaacctgaaacataaaatgaatgcaattgttgttgttaacttgtttattgcagcttataatggttacaaataaagcaatagcatcacaaatttcacaaataaagcatttttttcactgcattctagttgtggtttgtccaaactcatcaatgtatcttatcatgtctggatctgatcactgcttgagcctagaagatccggctgctaacaaagcccgaaaggaagctgagttggctgctgccaccgctgagcaataactatcataacccccggaatattaatagatcatggagataattaaaatgataaccatctcgcaaataaataagtattttactgttttcgtaacagttttgtaataaaaaaacctataaatattccggattattcataccgtcccaccatcgggcgcggatcccggtccgaagcgcgcggaattcaaaggcctaccgtcgacgccaccatggaatcccgtatctggtgcctggtcgtgtgcgtgaacctgtgcatcgtgtgcctgggtgctgctgtgtcctcctcctccacccgtggcacctccgctacccactcccaccactcctcccacaccacctccgccgctcactcccgttccggttccgtgtcccagcgtgtgacctcctcccagaccgtgtcccacggtgtcaacgagactatctacaacaccaccctgaagtacggcgacgtcgtgggtgtcaacaccaccaagtacccctaccgtgtgtgctccatggctcagggcaccgacctgatccgtttcgagcgtaacatcgtgtgcacctccatgaagcccatcaacgaggacctggacgagggtatcatggtggtgtacaagcgcaacatcgtggctcacaccttcaaggtccgcgtgtaccagaaggtgctgaccttccgtcgttcctacgcttacatccacaccacttacctgctgggttccaacaccgagtacgtggcccctcccatgtgggagatccaccacatcaactcccactcccagtgctactcctcttactcccgtgtgatcgctggcaccgtgttcgtggcttaccaccgtgactcctacgagaacaagaccatgcagctgatgcccgacgactactccaacacccactccacccgttacgtgaccgtgaaggaccagtggcactcccgtggttccacctggctgtaccgtgaaacctgcaacctgaactgcatggtcaccatcaccaccgctcgttccaagtacccttaccacttcttcgctacctccaccggcgacgtggtggacatctcccccttctacaacggtactaaccgtaacgcttcctacttcggcgagaacgctgacaagttcttcatcttccccaactacaccatcgtgtccgacttcggtcgtcccaactccgctctggaaacccaccgtctggtggctttcttggagcgtgctgactccgtgatctcctgggacatccaggacgagaagaacgtgacctgccagctgaccttctgggaggcttccgagcgtaccatccgttccgaggctgaggactcctaccacttctccagcgctaagatgaccgctaccttcctgtccaagaaacaagaggtcaacatgtccgactccgccctggactgcgtgcgtgacgaggctatcaacaagctgcagcagatcttcaacacctcctacaaccagacctacgagaagtacggaaacgtgtccgtgttcgagactaccggtggcctggtggtgttctggcagggtatcaagcagaagtccctggtcgagctggaacgtctggctaaccgttcctccctgaacctgacccacaaccgtaccaagcgttccaccgacggcaacaacgctactcacctgtccaacatggaatccgtgcacaacctggtgtacgctcagctgcagttcacctacgacaccctgcgcggttacatcaaccgtgctctggctcagatcgctgaggcttggtgcgtggaccagcgtcgtaccctggaagtgttcaaggaactgtccaagatcaacccctccgctatcctgtccgccatctacaacaagcctatcgctgctcgtttcatgggcgacgtgctgggcctggcttcctgcgtgaccatcaaccagacttccgtgaaggtgctgcgtgacatgaacgtgaaggaatcccccggtcgttgctactcccgtcccgtggtcatcttcaacttcgctaactcctcctacgtgcagtacggccagctgggcgaggacaacgagatcctgctgggcaaccaccgtaccgaggaatgccagctgccctccctgaagatcttcatcgctggcaactccgcttacgaatacgtggactacctgttcaagcgcatgatcgacctgtcctccatctctaccgtggactccatgatcgctctggacatcgaccccctggaaaacaccgacttccgtgtgctggaactgtactcccagaaggaactgcgttccatcaacgtgttcgacctggaagagatcatgcgcgagttcaactcctacaagcagcgtgttaagtacgtcgaggacaaggtggtggaccccctgcccccctacctgaagggactggacgacctgatgtccggcctgggagctgccggcaaggctgtgggtgtcgctatcggtgctgtgggtggtgctgtggcttccgtggtcgagggtgtcgccaccttcctgaagaaccccttcggtgctttcaccatcatcctggtggctatcgctgtggtcatcatcatctacctgatctacacccgtcagcgtcgtctgtgcatgcagcccctgcagaacctgttcccctacctggtgtccgctgacggtactaccgtgacctccggcaacaccaaggacacctccctgcaggctcccccatcctacgaggaatccgtctacaactccggtcgcaagggtcccggtcccccttcctccgacgcttctaccgctgctcccccatacaccaacgagcaggcttaccagatgctgctggctctcgtgcgtctggacgctgagcagcgtgcacagcagaacggcaccgactccctggacggccagaccggaacccaggacaagggccagaagcccaacctgctggaccgtctgcgtcaccgcaagaacggttaccgtcacctgaaggactccgacgaggaagagaacgtctaaggcgcgccaagcttgtcgagaagtactagagatcataatcagccataccacatttgtagaggttttacttgctttaaaaaacctcccacacctccccctgaacctgaaacataaaatgaatgcaattgttgttgttaacttgtttattgcagcttataatggttacaaataaagcaatagcatcacaaatttcacaaataaagcatttttttcactgcattctagttgtggtttgtccaaactcatcaatgtatcttatcatgtctggatctgatcactgcttgagcctagaagatccggctgctaacaaagcccgaaaggaagctgggaatattaatagatcatggagataattaaaatgataaccatctcgcaaataaataagtattttactgttttcgtaacagttttgtaataaaaaaacctataaatattccggattattcataccgtcccaccatcgggcgcggatccgccaccatgcgtcccggcctgccctcctacctgatcgtgctggctgtgtgcctgctgtcccacctcctgtcctcccgttacggtgctgaggctatctccgagcccctggacaaggctttccacctcctgctgaacacctacggtcgtcctatccgtttcctgcgcgagaacaccacccagtgcacctacaactcctccctgcgcaactccaccgtcgtccgcgagaacgctatctccttcaacttcttccagtcctacaaccagtactacgtgttccacatgccccgttgcctgttcgctggtcccctggctgagcagttcctgaaccaggtggacctgaccgagactctcgagcgttaccagcagcgtctgaacacttacgctctggtgtccaaggacctggcttcctaccgttccttcagccagcagctgaaggctcaggactccctgggcgagcagcccaccactgtgcctccccctatcgacctgtccatcccccacgtgtggatgcccccccagaccactcctcacggctggaccgagtcccacaccacctccggactgcaccgtccccacttcaaccagacctgcatcctgttcgacggtcacgacctgctgttctccaccgtgaccccctgcctgcaccagggcttctacctcatcgacgagctgcgttacgtgaagatcaccctgaccgaggatttcttcgtggtcaccgtgtccatcgacgacgacacccccatgctgctgatcttcggtcacctcccccgtgtgctgttcaaggctccctaccagcgtgacaacttcatcctgcgtcagaccgagaagcacgagctgctggtgctggtcaagaaggaccagctgaaccgtcactcttacctgaaggaccccgacttcctggacgctgctctggacttcaactacctggacctgtccgctctgctgaggaactccttccaccgttacgctgtggacgtgctgaagtccggtcgttgccagatgctggaccgtcgtaccgtcgagatggctttcgcttacgccctggctctgttcgctgctgctcgtcaagaagaggctggcgctcaggtgtccgtgccccgtgctctggaccgtcaggctgctctgctgcagatccaagagttcatgatcacttgcctgtcccagaccccccctcgtaccaccctgctgctgtaccccaccgctgtggacctggctaagcgtgctctgtggacccccaaccagatcaccgacatcacctccctcgtgcgtctggtgtacatcctgtccaagcagaaccagcagcacctgatcccccagtgggctctgcgtcagatcgctgacttcgctctgaagctgcacaagacccacctggcttcattcctcagcgctttcgctcgccaagagctgtacctgatgggttccctggtgcactccatgctggtgcacaccaccgagcgtcgcgagatcttcatcgtggaaaccggcctgtgctccctggccgagctgtcccacttcacccagctgctggctcacccccaccacgagtacctgtccgacctgtacaccccctgctcctcttccggtcgtcgtgaccactccctggaacgtctgacccgtctgttccccgacgctaccgtgcctaccaccgtgcctgctgctctgtccatcctgtctaccatgcagccctccaccctggaaaccttccccgacctgttctgcctgcctctgggcgagtccttctccgctctgaccgtgtccgagcacgtgtcctacgtggtcaccaaccagtacctgatcaagggcatctcctaccccgtgtccaccaccgtcgtgggccagtccctgatcatcacccagaccgactcccagaccaagtgcgagctgacccgtaacatgcacaccactcactccatcaccgctgctctgaacatctccctcgagaactgcgctttctgccagtccgctctgttggagtacgacgacactcagggtgtcatcaacatcatgtacatgcacgactccgacgacgtgctgttcgctctggacccctacaacgaggtggtggtgtcctccccccgtacccactacctgatgctgctgaagaacggcaccgtgctggaagtgaccgacgtggtggtggacgctaccgaccgtctgctgatgatgtccgtgtacgctctgtccgctatcatcggcatctacctgctgtaccgtatgctgaagacctgctaaggcgccaagctttgtcgagaagtactagaggatcataatcagccataccacatttgtagaggttttacttgctttaaaaaacctcccacacctccccctgaacctgaaacataaaatgaatgcaattgttgttgttaacttgtttattgcagcttataatggttacaaataaagcaatagcatcacaaatttcacaaataaagcatttttttcactgcattctagttgtggtttgtccaaactcatcaatgtatcttatcatgtctggatctgatcactgcttgagcctagaagatccggctgctaacaaagcccgaaaggaagctgagttggctgctgccaccgctgagcaataactatcataacccctaggagatccgaaccagataagtgaaatctagttccaaactattttgtcatttttaattttcgtattagcttacgacgctacacccagttcccatctattttgtcactcttccctaaataatccttaaaaactccatttccacccctcccagttcccaactattttgtccgcccaca

SEQ ID NO: 91 - DNA, 25782 bp, Artificial Sequence
  Synthetic construct
ttgttccagtttggaacaagagtccactattaaagaacgtggactccaacgtcaaagggcgaaaaaccgtctatcagggcgatggcccactacgtgaaccatcaccctaatcaagttttttggggtcgaggtgccgtaaagcactaaatcggaaccctaaagggagcccccgatttagagcttgacggggaaagccggcgaacgtggcgagaaaggaagggaagaaagcgaaaggagcgggcgctagggcgctggcaagtgtagcggtcacgctgcgcgtaaccaccacacccgccgcgcttaatgcgccgctacagggcgcgtccattcgccattcaggctgcgcaactgttgggaagggcgatcggtgcgggcctcttcgctattacgccagctggcgaaagggggatgtgctgcaaggcgattaagttgggtaacgccagggttttcccagtcacgacgttgtaaaacgacggccagtgcatagaccagccgcgtaacctggcaaaatcggttacggttgagtaataaatggatgccctgcgtaagcgggtgtgggcggacaataaagtcttaaactgaacaaaatagatctaaactatgacaataaagtcttaaactagacagaatagttgtaaactgaaatcagtccagttatgctgtgaaaaagcatactggacttttgttatggctaaagcaaactcttcattttctgaagtgcaaattgcccgtcgtattaaagaggggcgtggccaagggcatggtaaagactatattcgcggcgttgtgacaatttaccgaacaactccgcggccgggaagccgatctcggcttgaacgaattgttaggtggcggtacttgggtcgatatcaaagtgcatcacttcttcccgtatgcccaactttgtatagagagccactgcgggatcgtcaccgtaatctgcttgcacgtagatcacataagcaccaagcgcgttggcctcatgcttgaggagattgatgagcgcggtggcaatgccctgcctccggtgctcgccggagactgcgagatcatagatatagatctcactacgcggctgctcaaacttgggcagaacgtaagccgcgagagcgccaacaaccgcttcttggtcgaaggcagcaagcgcgatgaatgtcttactacggagcaagttcccgaggtaatcggagtccggctgatgttgggagtaggtggctacgtctccgaactcacgaccgaaaagatcaagagcagcccgcatggatttgacttggtcagggccgagcctacatgtgcgaatgatgcccatacttgagccacctaactttgttttagggcgactgccctgctgcgtaacatcgttgctgctgcgtaacatcgttgctgctccataacatcaaacatcgacccacggcgtaacgcgcttgctgcttggatgcccgaggcatagactgtacaaaaaaacagtcataacaagccatgaaaaccgccactgcgccgttaccaccgctgcgttcggtcaaggttctggaccagttgcgtgagcgcatacgctacttgcattacagtttacgaaccgaacaggcttatgtcaactgggtttgtgccttcatccgtttccacggtgtgcgtcacccggcaaccttgggcagcagcgaagtcgaggcatttctgtcctggctggcgaacgagcgcaaggtttcggtctccacgcatcgtcaggcattggcggccttgctgttcttctacggcaaggtgctgtgcacggatctgcccttgcttcaggagatcggtagacctcggccgtcgcggcgcttgccggtggtgctgaccccggatgaagtggttcgcatcctcggttttctggaaggcgagcatcgtttgttcgcccaggactctagctatagttctagtggttggctacagctttgtttgtactatcaacaggttgaactgctgatcaacagatcctctacgcggccgcggtaccataacttcgtatagcatacattatacgaagttatctggtttaaacgtacccgtagtggctatggcagggcttgccgccccgacgttggctgcgagccctgggccttcacccgaacttgggggttggggtggggaaaaggaagaaacgcgggcgtattggtcccaatggggtctcggtggggtatcgacagagtgccagccctgggaccgaaccccgcgtttatgaacaaacgacccaacacccgtgcgttttattctgtctttttattgccgtcatagcgcgggttccttccggtattgtctccttccgtgtttcagttagcctcccccatctcccggtaccgcatgctatgcatcagctgctagcaccatggctcgagatcccgggtgatcaagtcttcgtcgagtgattgtaaataaaatgtaatttacagtatagtattttaattaatatacaaatgatttgataataattcttatttaactataatatattgtgttgggttgaattaaaggtccgtatactagtatcgattcgcgacctactccggaatattaatagatcatggagataattaaaatgataaccatctcgcaaataaataagtattttactgttttcgtaacagttttgtaataaaaaaacctataaatattccggattattcataccgtcccaccatcgggcgcggatccgccaccatggaaaactggtccgctctggaactgctgcccaaggtcggaatccctaccgacttcctgacccacgtcaagacctccgctggcgaggaaatgttcgaggctctgaggatctactacggcgacgaccccgagcgttacaacatccacttcgaggctatcttcggcaccttctgcaaccgtctggaatgggtgtacttcctgacttccggcctggctgctgctgctcacgctatcaagttccacgacctgaacaagctgaccaccggcaagatgctgttccacgtgcaagtgccccgtgtggcttccggtgctggcctgcctacctcccgtcagaccaccatcatggtcaccaagtactccgagaagtcccccatcaccatccctttcgagctgtccgctgcttgcctgacttacctgcgtgaaaccttcgagggcaccatcctggacaagatcctgaacgtcgaggctatgcacaccgtgctgcgtgctctgaagaacaccgctgacgctatggaacgtggcctgatccacagcttcctccagaccctgctgaggaaggctcccccctacttcgtggtgcagaccctggtcgagaacgctaccctggctcgtcaggctctgaaccgtatccagcgctccaacatcctgcagtccttcaaggctaagatgctggctaccctgttcctgctgaaccgtacccgtgaccgtgactacgtgctgaagttcctgacccgtctggctgaggctgctaccgactccatcctcgacaaccctactacctacaccacctcctccggtgctaagatctccggtgtcatggtgtccaccgctaacgtgatgcagatcatcatgtccctgctgtcctcccacatcactaaggaaaccgtgtccgctcccgctacctacggcaacttcgtgctgtcccccgagaacgctgtgaccgctatctcctaccactctatcctggctgacttcaactcctacaaggctcacctgacctccggccagccccacctccccaacgactccctgagccaggctggtgctcactccctgacccccctgtccatggacgtgatccgtctgggcgaaaagaccgtgatcatggaaaacctgcgtcgcgtgtacaagaacaccgacaccaaggaccccctggaacgtaacgtggacctgaccttcttcttccccgtgggcctgtacctgcccgaggaccgtggttacaccaccgtcgagtccaaggtcaagctgaacgacaccgtgcgtaacgctctgcccaccaccgcttacctgctgaacagggaccgtgctgtgcaaaagatcgacttcgtggacgctctcaagaccctgtgccaccccgtgctgcacgagcctgctccatgcctgcaggctttcaccgagcgtggtcccccatccgagcccgctatgcagcgtctgctggaatgccgtttccagcaagagcccatgggtggtgctgctcgtcgtatcccccacttctaccgtgtgcgccgcgaggtgccccgtaccgtgaacgagatgaagcaggacttcgtggtcaccgacttctacaaggttggaaacatcaccctgtacaccgagctgcaccctttcttcgacttcacccactgccaagagaactccgagactgtggctctgtgcaccccccgtatcgtgatcggcaacctgcccgacggcctggctcccggtcccttccacgagctgaggacctgggagatcatggaacacatgcgcctgcgtcccccacccgactacgaggaaaccctgcgtctgttcaagaccaccgtgacctcccccaactaccccgagctgtgctacctggtggacgtgctggtgcacggcaacgctgacgctttcctgctgatccgcgctttcatcgctcgttgcatcgtgaacatgttccacacccgtcagctgctggtgttcgctcactcctacgctctggtcaccctgatcgctgagcacctggctgacggtgctctgcccccccagctcctgttccactaccgtaacctggtggctgtgctgcgcctggtcacccgtatctccgctctgcccggcctgaacaacggccagctggctgaggaacccctgtccgcttacgtgaacgctctgcacgaccacaggctgtggccccccttcgtgacccacctccctcgtaacatggaaggtgtccaggtggtggctgatcgtcagcccctgaaccccgctaacatcgaggctcgtcaccacggtgtctccgacgtgccccgtctgggtgctatggacgctgacgagcccctgttcgtggacgactaccgtgctaccgacgacgagtggaccctgcaaaaggtgttctacctgtgcctgatccccgctatgaccaacaaccgtgcttgcggcctgggcctgaacctcaagactctgctggtggacctgttctaccgtcccgccttcctgctcatgcccgctgctaccgctgtgtccacctccggcaccacctccaaggaatccacctctggtgtcacccccgaggactccgtggctgctcagcgtcaggctgtgggcgagatgctgaccgagctggtcgaggacgtggccaccgacgctcacacccctctgctgcaggcttgccgcgagctgttcctggctgtgcagttcgtgggcgagcacgtgaaggtgctggaagtgcgtgctcccctggaccacgctcagaggcagggactgcccgacttcatctcccgtcagcatgtgctgtacaacggttgctgcgtcgtgaccgctcctaagaccctgatcgagtactccctgcccgtgcccttccaccgtttctactccaaccccaccatctgcgctgctctgtccgacgacatcaagcgttacgtgaccgagttcccccactaccatagacacgatggtggtttccccctgcccaccgctttcgctcacgagtaccacaactggctgcgtagccccttctcccgttactccgctacctgccccaacgtgctgcactccgtgatgaccctggctgctatgctgtacaagatctcccccgtgtccctggtgctgcagaccaaggctcacatccaccccggtttcgctctgaccgctgtgcgtaccgacaccttcgaggtggacatgctgctgtactccggcaagtcctgcacctccgtcatcatcaacaaccccatcgtgaccaaggaagagagggacatctccaccacctaccacgtgacccagaacatcaacaccgtggacatgggcctgggttacacctccaacacttgcgtggcctacgtgaaccgcgtccgcaccgacatgggtgtccgtgtgcaggacctgttccgtgtgttccccatgaacgtgtaccgccacgatgaggtggaccgttggatcaggcacgctgctggcgtcgagcgtccccagctgctggacaccgagactatctccatgctgaccttcggttccatgtccgagcgcaacgctgctgctaccgtgcacggccagaaggctgtctgcgagctgatcctgacccctgtgactatggacgtgaactacttcaagatcaccaacaaccctcgtggtcgtgcttcctgcatgctgggcgtggacccctacgacaccgaggctgccaccaaggctatctacgaccaccgcgaggctgacgctcagaccttcgctgctacccacaacccatgggcttcccaggctggttgcctgtccgacgtcctgtacaacacccgtcaccgcgagcgtctgggctacaactccaagttctactccccctgcgctcagtacttcaacaccgaggaaatcatcgctgccaacaagaccctcttcaagaccatcgacgagtacctgctgcgcgctaaggactgcatccgtggcgacaccgacactcagtacgtgtgcgtcgagggaaccgagcagctgatcgagaacccttgccgtctgacccaagaggctctgcccatcctgtccaccaccaccctggctctgatggaaactaagctgaagggtggcgctggtgctttcgctacctccgagactcacttcggcaactacgtcgtgggagagatcatccccctgcagcagtccatgctgttcaacagctaagagctcaagcttgtcgagaagtactagaggatcataatcagccataccacatttgtagaggttttacttgctttaaaaaacctcccacacctccccctgaacctgaaacataaaatgaatgcaattgttgttgttaacttgtttattgcagcttataatggttacaaataaagcaatagcatcacaaatttcacaaataaagcatttttttcactgcattctagttgtggtttgtccaaactcatcaatgtatcttatcatgtctggatctgatcactgcttgagcctagaagatccggctgctaacaaagcccgaaaggaagctgagttggctgctgtggctagctttgtttaactttaagaaggagatacatctagaaatattaatagatcatggagataattaaaatgataaccatctcgcaaataaataagtattttactgttttcgtaacagttttgtaataaaaaaacctataaatattccggattattcataccgtcccaccatcgggcgcggatccgccaccatggctgctatggaagctaacatcttctgcaccttcgaccacaagctgtctatcgctgacgtgggcaagctgaccaagctggtggctgctgtggtgcccatcccccagcgtctgcacctgatcaagcactaccagctgggcctgcaccagttcgtggaccacacccgtggttacgtgcgtctgcgtggcctgctgcgtaacatgaccctgaccctgatgcgtcgtgtcgagggcaaccagatcctgctgcacgtgcccacccacggcctgctgtacaccgtgctgaacaccggtcccgtgacctgggagaagggcgacgctctgtgcgtgctgccccccctgttccacggtcccctggctcgtgaaaacctgttgaccctgggccagtgggagctggtgctgccctggatcgtgcccatgcccctggctctggaaatcaaccagcgcctgctgatcatgggcctgttctccctggaccgttcctacgaagaagtgaaggctgctgtccagcagctgcagaccatcaccttccgtgacgctaccttcaccatccccgaccccgtgatcgaccagcacctcctgatcgacatgaagaccgcttgcctgtccatgtccatggtggctaacctggcttccgagctgaccatgacctacgtccgcaagctggctttggaggactcttccatgctgctggtcaagtgccaagagctgctgatgcgtctggaccgcgagcgttccgtgggcgagcctcgtactcccgctcgtcctcagcacgtgtcccccgacgacgagatcgctcgtctgtccgctctgttcgtgatgctgcgtcagctggacgacctgatccgcgagcaggtcgtgttcaccgtgtgcgacgtgagcccagacaacaagtccgctacctgcatcttcaagggctaaggcgcgccaagcttgtcgagaagtactagaggatcataatcagccataccacatttgtagaggttttacttgctttaaaaaacctcccacacctccccctgaacctgaaacataaaatgaatgcaattgttgttgttaacttgtttattgcagcttataatggttacaaataaagcaatagcatcacaaatttcacaaataaagcatttttttcactgcattctagttgtggtttgtccaaactcatcaatgtatcttatcatgtctggatctgatcactgcttgagcctagaagatccggctgctaacaaagcccgaaaggaagctgagttggctgctgggtgcctaatgagtgagctaactcacattaattgcccggaatattaatagatcatggagataattaaaatgataaccatctcgcaaataaataagtattttactgttttcgtaacagttttgtaataaaaaaacctataaatattccggattattcataccgtcccaccatcgggcgcggatcccggtccgaagcgcgcggaattcaaaggcctacgtcgacgccaccatgtccaacaccgctcccggtcccaccgtggctaacaagcgtgacgagaagcaccgtcacgtggtcaacgtggtgctcgagctgcccaccgagatctccgaggctacccaccccgtgctggctaccatgctgtccaagtacacccgtatgtcctccctgttcaacgacaagtgcgctttcaagctggacctgctgcgtatggtggctgtgtcccgtacccgtcgctaaaagcttgtcgagaagtactagaggatcataatcagccataccacatttgtagaggttttacttgctttaaaaaacctcccacacctccccctgaacctgaaacataaaatgaatgcaattgttgttgttaacttgtttattgcagcttataatggttacaaataaagcaatagcatcacaaatttcacaaataaagcatttttttcactgcattctagttgtggtttgtccaaactcatcaatgtatcttatcatgtctggatctgatcactgcttgagcctagaagatccggctgctaacaaagcccgaaaggaagctgagttggctgctgggtgcctaatgagtgagctaactcacattaattgcccggaatattaatagatcatggagataattaaaatgataaccatctcgcaaataaataagtattttactgttttcgtaacagttttgtaataaaaaaacctataaatattccggattattcataccgtcccaccatcgggcgcggatcccggtccgaagcgcgcggaattcaaaggcctacgtcgacgccaccatggaatcccgtggtcgtcgttgccccgagatgatctccgtgctgggtcccatctccggtcacgtcctgaaggctgtgttctcccgtggcgacacccccgtgctgccccacgaaactcgtctgctgcagaccggtatccacgtgcgtgtgtcccagccctccctgatcctggtgtcccagtacacccccgactccaccccttgccaccgcggagacaaccagctgcaggtccagcacacctacttcaccggttccgaggtcgagaacgtgtccgtgaacgtgcacaaccccaccggtcgttccatctgcccctcccaagagcccatgtccatctacgtgtacgctctgcccctgaagatgctgaacatcccctccatcaacgtgcaccactacccctccgctgctgagcgcaagcaccgtcacctccccgtggctgacgctgtgatccacgcttccggcaagcagatgtggcaggctcgtctgaccgtgtccggcctggcttggacccgtcagcagaaccagtggaaggaacccgacgtgtactacacctccgctttcgtgttccccaccaaggacgtggccctgcgtcacgtcgtgtgcgctcacgaactcgtgtgctccatggaaaacacccgtgctaccaagatgcaagtgatcggcgaccagtacgtgaaggtgtacctggaatccttctgcgaggacgtgccctccggcaagctgttcatgcacgtgaccctgggttccgacgtggaagaggacctgaccatgacccgtaacccccagcccttcatgcgtccccacgagcgtaacggtttcaccgtgctgtgccccaagaacatgatcatcaagcccggcaagatctcccacatcatgctggacgtggccttcacctcccacgagcacttcggcctgctgtgccctaagtccatccccggcctgtccatctccggcaacctgctgatgaacggccagcagatcttcctggaagtgcaggctatccgtgaaaccgtcgagctgcgtcagtacgaccctgtggctgctctgttcttcttcgacatcgacctgctgctgcagcgtggtccccagtactccgagcaccccaccttcaccagccagtaccgtatccagggcaagctggaataccgtcacacctgggaccgtcacgacgagggtgctgctcagggcgacgacgacgtgtggacctccggttccgactccgacgaggaactggtcaccaccgagcgcaagaccccccgtgtgaccggtggtggtgctatggctggtgcttccacctccgctggtcgcaagcgcaagtccgcttcctccgctaccgcttgcaccgctggtgtcatgacccgtggtcgcctgaaggctgagtccaccgtggctcccgaagaggacactgacgaggactccgacaacgagatccacaaccccgctgtgttcacctggcccccctggcaggctggtatcctggctcgtaacctggtgcccatggtggctaccgtgcagggccagaacctgaagtaccaagagttcttctgggacgccaacgacatctaccgtatcttcgctgagctggaaggcgtgtggcagcccgctgctcagcccaagcgtcgtcgtcaccgtcaggacgctctgcctggtccctgtatcgcttccacccccaagaagcaccgcggctaaaagcttgtcgagaagtactagaggatcataatcagccataccacatttgtagaggttttacttgctttaaaaaacctcccacacctccccctgaacctgaaacataaaatgaatgcaattgttgttgttaacttgtttattgcagcttataatggttacaaataaagcaatagcatcacaaatttcacaaataaagcatttttttcactgcattctagttgtggtttgtccaaactcatcaatgtatcttatcatgtctggatctgatcactgcttgagcctagaagatccggctgctaacaaagcccgaaaggaagctgggaatattaatagatcaatggagataattaaaatgataaccatctcgcaaataaataagtattttactgttttcgtaacagttttgtaataaaaaaacctataaatattccggattattcataccgtcccaccatcgggcgcggatccgccaccatggccccctcccacgtggacaaggtgaacacccgcacctggtccgcctccatcgtgttcatggtgctgaccttcgtgaacgtgtccgtgcacctggtgctgtccaacttcccccacctgggctacccctgcgtgtactaccacgtggtggacttcgagcgcctgaacatgtccgcctacaacgtgatgcacctgcacacccccatgctgttcctggactccgtgcagctggtgtgctacgccgtgttcatgcagctggtgttcctggccgtgaccatctactacctggtgtgctggatcaagatctccatgcgcaaggacaagggcatgtccctgaaccagtccacccgcgacatctcctacatgggcgactccctgaccgccttcctgttcatcctgtccatggacaccttccagctgttcaccctgaccatgtccttccgcctgccctccatgatcgccttcatggccgccgtgcacttcttctgcctgaccatcttcaacgtgtccatggtgacccagtaccgctcctacaagcgctccctgttcttcttctcccgcctgcaccccaagctgaagggcaccgtgcagttccgcaccctgatcgtgaacctggtggaggtggccctgggcttcaacaccaccgtggtggccatggccctgtgctacggcttcggcaacaacttcttcgtgcgcaccggccacatggtgctggccgtgttcgtggtgtacgccatcatctccatcatctacttcctgctgatcgaggccgtgttcttccagtacgtgaaggtgcagttcggctaccacctgggcgccttcttcggcctgtgcggcctgatctaccccatcgtgcagtacgacaccttcctgtccaacgagtaccgcaccggcatctcctggtccttcggcatgctgttcttcatctgggccatgttcaccacctgccgcgccgtgcgctacttccgcggccgcggctccggctccgtgaagtaccaggccctggccaccgcctccggcgaggaggtggccgccctgtcccaccacgactccctggagtcccgccgcctgcgcgaggaggaggacgacgacgacgacgaggacttcgaggacgcctaagagctcaagcttgtcgagaagtactagaggatcataatcagccataccacatttgtagaggttttacttgctttaaaaaacctcccacacctccccctgaacctgaaacataaaatgaatgcaattgttgttgttaacttgtttattgcagcttataatggttacaaataaagcaatagcatcacaaatttcacaaataaagcatttttttcactgcattctagttgtggtttgtccaaactcatcaatgtatcttatcatgtctggatctgatcactgcttgagcctagaagatccggctgctaacaaagcccgaaaggaagctgagttggctgctgccaccgctgagcaataactatcataacccctaggggcctctaaacgggtcttgaggggttttttgctgaaaggaggaactatatccggatctgaacaggagggacagctgatagaaacagaagccactggagcacctcaaaaacaccatcatacactaaatcagtaagttggcagcatcacccgacgcactttgcgccgaataaatacctgtgacggaagatcacttcgcagaataaataaatcctggtgtccctgttgataccgggaagccctgggccaacttttggcgaaaatgagacgttgatcggcacgtaagaggttccaactttcaccataatgaaataagatcactaccgggcgtattttttgagttatcgagattttcaggagctaaggaagctaaaatggagaaaaaaatcactggatataccaccgttgatatatcccaatggcatcgtaaagaacattttgaggcatttcagtcagttgctcaatgtacctataaccagaccgttcagctggatattacggcctttttaaagaccgtaaagaaaaataagcacaagttttatccggcctttattcacattcttgcccgcctgatgaatgctcatccggaattccgtatggcaatgaaagacggtgagctggtgatatgggatagtgttcacccttgttacaccgttttccatgagcaaactgaaacgttttcatcgctctggagtgaataccacgacgatttccggcagtttctacacatatattcgcaagatgtggcgtgttacggtgaaaacctggcctatttccctaaagggtttattgagaatatgtttttcgtctcagccaatccctgggtgagtttcaccagttttgatttaaacgtggccaatatggacaacttcttcgcccccgttttcaccatgggcaaatattatacgcaaggcgacaaggtgctgatgccgctggcgattcaggttcatcatgccgtttgtgatggcttccatgtcggcagaatgcttaatgaattacaacagtactgcgatgagtggcagggcggggcgtaatttttttaaggcagttattggtgcccttaaacgcctggttgctacgcctgaataagtgataataagcggatgaatggcagaaattcgaaagcaaattcgacccggtcgtcggttcagggcagggtcgttaaatagccgcttatgtctattgctggtttaccggtttattgactaccggaagcagtgtgaccgtgtgcttctcaaatgcctgaggccagtttgctcaggctctccccgtggaggtaataattgacgatatgatcatttattctgcctcccagctgacattcatccggggtcagcaccgtttctgcggactggctttctacgtgttccgcttcctttagcagcccttgcgccctgagtgcttgcggcagcgtgaagctaattctgtcagccgttaagtgttcctgtgtcactcaaaattgctttgagaggctctaagggcttctcagtgcgttacatccctggcttgttgtccacaaccgttaaaccttaaaagctttaaaagccttatatattcttttttttcttataaaacttaaaaccttagaggctatttaagttgctgatttatattaattttattgttcaaacatgagagcttagtacgtgaaacatgagagcttagtacgttagccatgagagcttagtacgttagccatgagggtttagttcgttaaacatgagagcttagtacgttaaacatgagagcttagtacgtgaaacatgagagcttagtacgtactatcaacaggttgaactgctgatcaacagatcctctacgcggccgcggtaccataacttcgtatagcatacattatacgaagttatctggtttaaacgtacccgtagtggctatggcagggcttgccgccccgacgttggctgcgagccctgggccttcacccgaacttgggggttggggtggggaaaaggaagaaacgcgggcgtattggtcccaatggggtctcggtggggtatcgacagagtgccagccctgggaccgaaccccgcgtttatgaacaaacgacccaacacccgtgcgttttattctgtctttttattgccgtcatagcgcgggttccttccggtattgtctccttccgtgtttcagttagcctcccccatctcccggtaccgcatgctatgcatcagctgctagcttagcgagcgtccacagcctggggaccgtaacgggagtgagcgggcaggttcacacgggtctgcttcagctcagggggcaggccagcgtagtacttgtccaggtgacgcagcaggggggggtccagctggtgacgcaggcagaattccttcacagcgttgtacaggccgtagaacagggtgataccctcgggagcagcagcggtggacacgggcagacgcacagcacggttggtacgggtagcctcgttacggatagccaccaccacgttgaacagggaggggggcaccagctcgaaacccagcacgtgttcggtgaagatggaacgaccgtaggacagacgagtcaggtcgtaaccacggcacaggtcgtccacgcaagtgtacacagcgggggaaccgtcgccgcactcggagtaaccgcgcatcacggtcatccaacggggagcggtgtcggaggacagcagggtcagcagagcacgcagctggtcggggttgttgtacagcagggccagggtgtccaggaaagcgtcgtccagcagcacggagttagcagcctcgggggtcacgggacggtaacggatcagctgggacaggggaccgtccctacgggtcacgttgaccaggggacgcagccaggactcgtacttgtcgccctggaacacctctcccagcaggcaacgacgggtcagctcggggcactcagcgggcaccttctcagccacggtgggagccacggacacggtagcggaggacacgatgggcagcagcaggcagcaccacagcagagccacgggaccgggggagaaggagaaaccgcagtcgggacgacggcacatggtggctcgagatcccgggtgatcaagtcttcgtcgagtgattgtaaataaaatgtaatttacagtatagtattttaattaatatacaaatgatttgataataattcttatttaactataatatattgtgttgggttgaattaaaggtccgtatactagtatcgattcgcgacctactccggaatattaatagatcatggagataattaaaatgataaccatctcgcaaataaataagtattttactgttttcgtaacagttttgtaataaaaaaacctataaatattccggattattcataccgtcccaccatcgggcgcggatccgccaccatgaactccaaggacctgacccccttcctgaccaccctgtggctgctgctggaccactcccgtgtgcctcgtgtgcgtgctgaggaatgctgcgaagtgatcaacgtgaaccacccccccgagcgctgctacgacttcaagatgtgcaacctgttcaccgtggctctgcgttgccccgacggcgaagtgtgctactcccccgaaaagaccgctgagatccgtggtatcgtgaccaccatgacccactccctgacccgtcaagtgatccacaacaagctgaccagctgcaactacaaccccctgtacctcgaggctgacggtcgtatccgttgcggcaaggtgtccgacaaggctcagtacctgctgggtgctgctggttccgtgccctaccgttggatcaacctcgagtacgacaagatcacccgtatcgtgggcctggaccagtacctcgagtccgtgaagaagcacaagcgtctggacgtgtgccgtgctaagatgggttacatgctgcagtaaaagcttgtcgagaagtactagaggatcataatcagccataccacatttgtagaggttttacttgctttaaaaaacctcccacacctccccctgaacctgaaacataaaatgaatgcaattgttgttgttaacttgtttattgcagcttataatggttacaaataaagcaatagcatcacaaatttcacaaataaagcatttttttcactgcattctagttgtggtttgtccaaactcatcaatgtatcttatcatgtctggatctgatcactgcttgagcctagaagatccggctgctaacaaagcccgaaaggaagctgagttggctgctgtggctagctttgtttaactttaagaaggagatacatctagaccggaatattaatagatcatggagataattaaaatgataaccatctcgcaaataaataagtattttactgttttcgtaacagttttgtaataaaaaaacctataaatattccggattattcataccgtcccaccatcgggcgcggatccgccaccatgctgcgtctgctgctgcgtcaccacttccactgcctgctgctgtgcgctgtgtgggctaccccctgcctggcttccccctggttcaccctgaccgctaaccagaacccctccccaccctggtccaagctgacctaccccaagccccacgacgctgctaccttctactgccccttcctgtacccatccccacctcgttccccatcccagttctccggtttccagcgtgtgtccaccggtcccgagtgccgtaacgagactctgtacctgctgtacaaccgcgagggccagaccctggtcgagaggtcctccacctgggtcaagaaggtcatctggtacttgtccggtcgtaaccagaccatcctgcagcgtatgccccgtaccgcttccaagccctccgacggcaacgtgcagatctccgtcgaggacgctaagatcttcggtgctcacatggtgcccaagcagaccaagctgctgcgtttcgtggtcaacgacggcacccgttaccagatgtgcgtgatgaagctggaatcctgggctcacgtgttccgtgactactccgtgtccttccaagtgcgcctgaccttcaccgaggctaacaaccagacctacaccttctgcacccaccccaacctgatcgtgtaagtcgacaagcttgtcgagaagtactagaggatcataatcagccataccacatttgtagaggttttacttgctttaaaaaacctcccacacctccccctgaacctgaaacataaaatgaatgcaattgttgttgttaacttgtttattgcagcttataatggttacaaataaagcaatagcatcacaaatttcacaaataaagcatttttttcactgcattctagttgtggtttgtccaaactcatcaatgtatcttatcatgtctggatctgatcactgcttgagcctagaagatccggctgctaacaaagcccgaaaggaagctgagttggctgctgggtgcctaatgagtgagctaactcacattaattgcccggaatattaatagatcatggagataattaaaatgataaccatctcgcaaataaataagtattttactgttttcgtaacagttttgtaataaaaaaacctataaatattccggattattcataccgtcccaccatcgggcgcggatccgccaccggatccgccaccatgcgtctgtgccgtgtgtggctgtccgtgtgcctgtgcgctgtggtgctgggacagtgccagcgtgaaaccgctgagaagaacgactactaccgtgtgccccactactgggacgcttgctcccgtgctctgcccgaccagacccgttacaagtacgtcgagcagctggtggacctgaccctgaactaccactacgacgcttcccacggcctggacaacttcgacgtgctgaagcgtatcaacgtgaccgaggtgtccctgctgatctccgacttccgtcgtcagaaccgtcgtggtggcaccaacaagcgtaccaccttcaacgctgctggttccctggctccccacgctcgttccttggagttctccgtgcgtctgttcgccaactaataaaagcttgtcgagaagtactagaggatcataatcagccataccacatttgtagaggttttacttgctttaaaaaacctcccacacctccccctgaacctgaaacataaaatgaatgcaattgttgttgttaacttgtttattgcagcttataatggttacaaataaagcaatagcatcacaaatttcacaaataaagcatttttttcactgcattctagttgtggtttgtccaaactcatcaatgtatcttatcatgtctggatctgatcactgcttgagcctagaagatccggctgctaacaaagcccgaaaggaagctgagttggctgctgccaccgctgagcaataactatcataacccccggaatattaatagatcatggagataattaaaatgataaccatctcgcaaataaataagtattttactgttttcgtaacagttttgtaataaaaaaacctataaatattccggattattcataccgtcccaccatcgggcgcggatcccggtccgaagcgcgcggaattcaaaggcctaccgtcgacgccaccatggaatcccgtatctggtgcctggtcgtgtgcgtgaacctgtgcatcgtgtgcctgggtgctgctgtgtcctcctcctccacccgtggcacctccgctacccactcccaccactcctcccacaccacctccgccgctcactcccgttccggttccgtgtcccagcgtgtgacctcctcccagaccgtgtcccacggtgtcaacgagactatctacaacaccaccctgaagtacggcgacgtcgtgggtgtcaacaccaccaagtacccctaccgtgtgtgctccatggctcagggcaccgacctgatccgtttcgagcgtaacatcgtgtgcacctccatgaagcccatcaacgaggacctggacgagggtatcatggtggtgtacaagcgcaacatcgtggctcacaccttcaaggtccgcgtgtaccagaaggtgctgaccttccgtcgttcctacgcttacatccacaccacttacctgctgggttccaacaccgagtacgtggcccctcccatgtgggagatccaccacatcaactcccactcccagtgctactcctcttactcccgtgtgatcgctggcaccgtgttcgtggcttaccaccgtgactcctacgagaacaagaccatgcagctgatgcccgacgactactccaacacccactccacccgttacgtgaccgtgaaggaccagtggcactcccgtggttccacctggctgtaccgtgaaacctgcaacctgaactgcatggtcaccatcaccaccgctcgttccaagtacccttaccacttcttcgctacctccaccggcgacgtggtggacatctcccccttctacaacggtactaaccgtaacgcttcctacttcggcgagaacgctgacaagttcttcatcttccccaactacaccatcgtgtccgacttcggtcgtcccaactccgctctggaaacccaccgtctggtggctttcttggagcgtgctgactccgtgatctcctgggacatccaggacgagaagaacgtgacctgccagctgaccttctgggaggcttccgagcgtaccatccgttccgaggctgaggactcctaccacttctccagcgctaagatgaccgctaccttcctgtccaagaaacaagaggtcaacatgtccgactccgccctggactgcgtgcgtgacgaggctatcaacaagctgcagcagatcttcaacacctcctacaaccagacctacgagaagtacggaaacgtgtccgtgttcgagactaccggtggcctggtggtgttctggcagggtatcaagcagaagtccctggtcgagctggaacgtctggctaaccgttcctccctgaacctgacccacaaccgtaccaagcgttccaccgacggcaacaacgctactcacctgtccaacatggaatccgtgcacaacctggtgtacgctcagctgcagttcacctacgacaccctgcgcggttacatcaaccgtgctctggctcagatcgctgaggcttggtgcgtggaccagcgtcgtaccctggaagtgttcaaggaactgtccaagatcaacccctccgctatcctgtccgccatctacaacaagcctatcgctgctcgtttcatgggcgacgtgctgggcctggcttcctgcgtgaccatcaaccagacttccgtgaaggtgctgcgtgacatgaacgtgaaggaatcccccggtcgttgctactcccgtcccgtggtcatcttcaacttcgctaactcctcctacgtgcagtacggccagctgggcgaggacaacgagatcctgctgggcaaccaccgtaccgaggaatgccagctgccctccctgaagatcttcatcgctggcaactccgcttacgaatacgtggactacctgttcaagcgcatgatcgacctgtcctccatctctaccgtggactccatgatcgctctggacatcgaccccctggaaaacaccgacttccgtgtgctggaactgtactcccagaaggaactgcgttccatcaacgtgttcgacctggaagagatcatgcgcgagttcaactcctacaagcagcgtgttaagtacgtcgaggacaaggtggtggaccccctgcccccctacctgaagggactggacgacctgatgtccggcctgggagctgccggcaaggctgtgggtgtcgctatcggtgctgtgggtggtgctgtggcttccgtggtcgagggtgtcgccaccttcctgaagaaccccttcggtgctttcaccatcatcctggtggctatcgctgtggtcatcatcatctacctgatctacacccgtcagcgtcgtctgtgcatgcagcccctgcagaacctgttcccctacctggtgtccgctgacggtactaccgtgacctccggcaacaccaaggacacctccctgcaggctcccccatcctacgaggaatccgtctacaactccggtcgcaagggtcccggtcccccttcctccgacgcttctaccgctgctcccccatacaccaacgagcaggcttaccagatgctgctggctctcgtgcgtctggacgctgagcagcgtgcacagcagaacggcaccgactccctggacggccagaccggaacccaggacaagggccagaagcccaacctgctggaccgtctgcgtcaccgcaagaacggttaccgtcacctgaaggactccgacgaggaagagaacgtctaaggcgcgccaagcttgtcgagaagtactagagatcataatcagccataccacatttgtagaggttttacttgctttaaaaaacctcccacacctccccctgaacctgaaacataaaatgaatgcaattgttgttgttaacttgtttattgcagcttataatggttacaaataaagcaatagcatcacaaatttcacaaataaagcatttttttcactgcattctagttgtggtttgtccaaactcatcaatgtatcttatcatgtctggatctgatcactgcttgagcctagaagatccggctgctaacaaagcccgaaaggaagctgggaatattaatagatcatggagataattaaaatgataaccatctcgcaaataaataagtattttactgttttcgtaacagttttgtaataaaaaaacctataaatattccggattattcataccgtcccaccatcgggcgcggatccgccaccatgcgtcccggcctgccctcctacctgatcgtgctggctgtgtgcctgctgtcccacctcctgtcctcccgttacggtgctgaggctatctccgagcccctggacaaggctttccacctcctgctgaacacctacggtcgtcctatccgtttcctgcgcgagaacaccacccagtgcacctacaactcctccctgcgcaactccaccgtcgtccgcgagaacgctatctccttcaacttcttccagtcctacaaccagtactacgtgttccacatgccccgttgcctgttcgctggtcccctggctgagcagttcctgaaccaggtggacctgaccgagactctcgagcgttaccagcagcgtctgaacacttacgctctggtgtccaaggacctggcttcctaccgttccttcagccagcagctgaaggctcaggactccctgggcgagcagcccaccactgtgcctccccctatcgacctgtccatcccccacgtgtggatgcccccccagaccactcctcacggctggaccgagtcccacaccacctccggactgcaccgtccccacttcaaccagacctgcatcctgttcgacggtcacgacctgctgttctccaccgtgaccccctgcctgcaccagggcttctacctcatcgacgagctgcgttacgtgaagatcaccctgaccgaggatttcttcgtggtcaccgtgtccatcgacgacgacacccccatgctgctgatcttcggtcacctcccccgtgtgctgttcaaggctccctaccagcgtgacaacttcatcctgcgtcagaccgagaagcacgagctgctggtgctggtcaagaaggaccagctgaaccgtcactcttacctgaaggaccccgacttcctggacgctgctctggacttcaactacctggacctgtccgctctgctgaggaactccttccaccgttacgctgtggacgtgctgaagtccggtcgttgccagatgctggaccgtcgtaccgtcgagatggctttcgcttacgccctggctctgttcgctgctgctcgtcaagaagaggctggcgctcaggtgtccgtgccccgtgctctggaccgtcaggctgctctgctgcagatccaagagttcatgatcacttgcctgtcccagaccccccctcgtaccaccctgctgctgtaccccaccgctgtggacctggctaagcgtgctctgtggacccccaaccagatcaccgacatcacctccctcgtgcgtctggtgtacatcctgtccaagcagaaccagcagcacctgatcccccagtgggctctgcgtcagatcgctgacttcgctctgaagctgcacaagacccacctggcttcattcctcagcgctttcgctcgccaagagctgtacctgatgggttccctggtgcactccatgctggtgcacaccaccgagcgtcgcgagatcttcatcgtggaaaccggcctgtgctccctggccgagctgtcccacttcacccagctgctggctcacccccaccacgagtacctgtccgacctgtacaccccctgctcctcttccggtcgtcgtgaccactccctggaacgtctgacccgtctgttccccgacgctaccgtgcctaccaccgtgcctgctgctctgtccatcctgtctaccatgcagccctccaccctggaaaccttccccgacctgttctgcctgcctctgggcgagtccttctccgctctgaccgtgtccgagcacgtgtcctacgtggtcaccaaccagtacctgatcaagggcatctcctaccccgtgtccaccaccgtcgtgggccagtccctgatcatcacccagaccgactcccagaccaagtgcgagctgacccgtaacatgcacaccactcactccatcaccgctgctctgaacatctccctcgagaactgcgctttctgccagtccgctctgttggagtacgacgacactcagggtgtcatcaacatcatgtacatgcacgactccgacgacgtgctgttcgctctggacccctacaacgaggtggtggtgtcctccccccgtacccactacctgatgctgctgaagaacggcaccgtgctggaagtgaccgacgtggtggtggacgctaccgaccgtctgctgatgatgtccgtgtacgctctgtccgctatcatcggcatctacctgctgtaccgtatgctgaagacctgctaaggcgccaagctttgtcgagaagtactagaggatcataatcagccataccacatttgtagaggttttacttgctttaaaaaacctcccacacctccccctgaacctgaaacataaaatgaatgcaattgttgttgttaacttgtttattgcagcttataatggttacaaataaagcaatagcatcacaaatttcacaaataaagcatttttttcactgcattctagttgtggtttgtccaaactcatcaatgtatcttatcatgtctggatctgatcactgcttgagcctagaagatccggctgctaacaaagcccgaaaggaagctgagttggctgctgccaccgctgagcaataactatcataacccctaggagatccgaaccagataagtgaaatctagttccaaactattttgtcatttttaattttcgtattagcttacgacgctacacccagttcccatctattttgtcactcttccctaaataatccttaaaaactccatttccacccctcccagttcccaactattttgtccgcccaca

1. A recombinant virus-like particle comprising one or more capsid or capsid precursor proteins, 3 or more surface proteins from cytomegalovirus (CMV), and optionally one or more tegument proteins.

2. The recombinant virus-like particle according to claim 1 comprising one or more capsid or capsid precursor proteins, 5 or more surface proteins from cytomegalovirus (CMV), and optionally one or more tegument proteins.

3. The recombinant virus-like particle according to claim 1 or 2 comprising one or more capsid proteins from a herpes virus, and one or more tegument proteins from human cytomegalovirus (HCMV).

4. The recombinant virus-like particle according to claim 1 or 2 comprising one or more capsid or capsid precursor proteins from a retrovirus.

5. The recombinant virus-like particle according to claim 1 or 2 comprising one or more capsid proteins from a herpes virus, 3 or more surface proteins from human cytomegalovirus (HCMV) and optionally one or more tegument proteins from human cytomegalovirus (HCMV).

6. The recombinant virus-like particle according to claim 3 wherein the herpesvirus is human cytomegalovirus HCMV.

7. The recombinant virus-like particle according to claim 4 wherein the one or more capsid or capsid precursor proteins from a retrovirus is gag.

8. The recombinant virus-like particle according to claim 1 wherein the cytomegalovirus surface proteins are selected from the group consisting of gpUL75 (gH), gpUL115 (gL), gpUL55 (gB), gpUL74 (gO), gpUL100 (gM), gpUL73 (gN), gpUL128, gpUL130, and gpUL131A.

9. The recombinant virus-like particle according to claim 1 wherein the tegument proteins are selected from the group consisting of pUL83 and pUL32.

10. A DNA encoding the proteins comprised in a virus-like particle according to claim 1.

11. A vector comprising DNA according to claim 10.

12. A baculovirus vector according to claim 11.

13. A host cell comprising a vector according to claim 11.

14. A vaccine comprising a recombinant virus-like particle according to claim 1.

15. The vaccine of claim 14 further comprising the pentameric complex consisting of gpUL75, gpUL115, gpUL128, gpUL130 and gpUL131A.

16. The vaccine of claim 14 further comprising a soluble CMV protein selected from the group consisting of gpUL75, gpUL115, gpUL55, gpUL74, gpUL100, gpUL73, gpUL128, gpUL130, and gpUL131A.

17. The vaccine of claim 14 further comprising a soluble CMV protein selected from the group consisting of pUL83, IE-1, pUL99, pUL91, pUL82, and pp150.

18. The vaccine of claim 14 comprising CMV proteins from different CMV strains selected from the group of Towne, Toledo, AD169, Merlin, TB20, and VR1814 strains.
